United States Patent Application Publication US 2026/0234197 A1, published August 13, 2026 (application 19/153,020).

The application's sequence listing, which the Patent Office published only in electronic form, follows.

SEQUENCE LISTING (1413 sequences)

SEQ ID NO: 1 - DNA, 2208 bp, synthetic construct
  misc_feature 1..2208: note = Wild type Capsid protein from Adeno Associated Virus 9
  source 1..2208: mol_type = other DNA
atggctgccgatggttatcttccagattggctcgaggacaaccttagtgaaggaattcgcgagtggtgggctttgaaacctggagcccctcaacccaaggcaaatcaacaacatcaagacaacgctcgaggtcttgtgcttccgggttacaaataccttggacccggcaacggactcgacaagggggagccggtcaacgcagcagacgcggcggccctcgagcacgacaaggcctacgaccagcagctcaaggccggagacaacccgtacctcaagtacaaccacgccgacgccgagttccaggagcggctcaaagaagatacgtcttttgggggcaacctcgggcgagcagtcttccaggccaaaaagaggcttcttgaacctcttggtctggttgaggaagcggctaagacggctcctggaaagaagaggcctgtagagcagtctcctcaggaaccggactcctccgcgggtattggcaaatcgggtgcacagcccgctaaaaagagactcaatttcggtcagactggcgacacagagtcagtcccagaccctcaaccaatcggagaacctcccgcagccccctcaggtgtgggatctcttacaatggcttcaggtggtggcgcaccagtggcagacaataacgaaggtgccgatggagtgggtagttcctcgggaaattggcattgcgattcccaatggctgggggacagagtcatcaccaccagcacccgaacctgggccctgcccacctacaacaatcacctctacaagcaaatctccaacagcacatctggaggatcttcaaatgacaacgcctacttcggctacagcaccccctgggggtattttgacttcaacagattccactgccacttctcaccacgtgactggcagcgactcatcaacaacaactggggattccggcctaagcgactcaacttcaagctcttcaacattcaggtcaaagaggttacggacaacaatggagtcaagaccatcgccaataaccttaccagcacggtccaggtcttcacggactcagactatcagctcccgtacgtgctcgggtcggctcacgagggctgcctcccgccgttcccagcggacgttttcatgattcctcagtacgggtatctgacgcttaatgatggaagccaggccgtgggtcgttcgtccttttactgcctggaatatttcccgtcgcaaatgctaagaacgggtaacaacttccagttcagctacgagtttgagaacgtacctttccatagcagctacgctcacagccaaagcctggaccgactaatgaatccactcatcgaccaatacttgtactatctctcaaagactattaacggttctggacagaatcaacaaacgctaaaattcagtgtggccggacccagcaacatggctgtccagggaagaaactacatacctggacccagctaccgacaacaacgtgtctcaaccactgtgactcaaaacaacaacagcgaatttgcttggcctggagcttcttcttgggctctcaatggacgtaatagcttgatgaatcctggacctgctatggccagccacaaagaaggagaggaccgtttctttcctttgtctggatctttaatttttggcaaacaaggaactggaagagacaacgtggatgcggacaaagtcatgataaccaacgaagaagaaattaaaactactaacccggtagcaacggagtcctatggacaagtggccacaaaccaccagagtgcccaagcacaggcgcagaccggctgggttcaaaaccaaggaatacttccgggtatggtttggcaggacagagatgtgtacctgcaaggacccatttgggccaaaattcctcacacggacggcaactttcacccttctccgctgatgggagggtttggaatgaagcacccgcctcctcagatcctcatcaaaaacacacctgtacctgcggatcctccaacggccttcaacaaggacaagctgaactctttcatcacccagtattctactggccaagtcagcgtggagatcgagtgggagctgcagaaggaaaacagcaagcgctggaacccggagatccagtacacttccaactattacaagtctaataatgttgaatttgctgttaatactgaaggtgtatatagtgaaccccgccccattggcaccagatacctgactcgtaatctg

SEQ ID NO: 2 - protein, 736 aa, synthetic construct
  REGION 1..736: note = Wild type Capsid protein from Adeno Associated Virus 9
MAADGYLPDWLEDNLSEGIREWWALKPGAPQPKANQQHQDNARGLVLPGYKYLGPGNGLDKGEPVNAADAAALEHDKAYDQQLKAGDNPYLKYNHADAEFQERLKEDTSFGGNLGRAVFQAKKRLLEPLGLVEEAAKTAPGKKRPVEQSPQEPDSSAGIGKSGAQPAKKRLNFGQTGDTESVPDPQPIGEPPAAPSGVGSLTMASGGGAPVADNNEGADGVGSSSGNWHCDSQWLGDRVITTSTRTWALPTYNNHLYKQISNSTSGGSSNDNAYFGYSTPWGYFDFNRFHCHFSPRDWQRLINNNWGFRPKRLNFKLFNIQVKEVTDNNGVKTIANNLTSTVQVFTDSDYQLPYVLGSAHEGCLPPFPADVFMIPQYGYLTLNDGSQAVGRSSFYCLEYFPSQMLRTGNNFQFSYEFENVPFHSSYAHSQSLDRLMNPLIDQYLYYLSKTINGSGQNQQTLKFSVAGPSNMAVQGRNYIPGPSYRQQRVSTTVTQNNNSEFAWPGASSWALNGRNSLMNPGPAMASHKEGEDRFFPLSGSLIFGKQGTGRDNVDADKVMITNEEEIKTTNPVATESYGQVATNHQSAQAQAQTGWVQNQGILPGMVWQDRDVYLQGPIWAKIPHTDGNFHPSPLMGGFGMKHPPPQILIKNTPVPADPPTAFNKDKLNSFITQYSTGQVSVEIEWELQKENSKRWNPEIQYTSNYYKSNNVEFAVNTEGVYSEPRPIGTRYLTRNL

SEQ ID NO: 3 - DNA, 2208 bp, synthetic construct
  misc_feature 1..2208: note = Adeno Associated Virus Capsid Protein Variant
  source 1..2208: mol_type = other DNA
atggctgccgatggttatcttccagattggctcgaggacaaccttagtgaaggaattcgcgagtggtgggctttgaaacctggagcccctcaacccaaggcaaatcaacaacatcaagacaacgctcgaggtcttgtgcttccgggttacaaataccttggacccggcaacggactcgacaagggggagccggtcaacgcagcagacgcggcggccctcgagcacgacaaggcctacgaccagcagctcaaggccggagacaacccgtacctcaagtacaaccacgccgacgccgagttccaggagcggctcaaagaagatacgtcttttgggggcaacctcgggcgagcagtcttccaggccaaaaagaggcttcttgaacctcttggtctggttgaggaagcggctaagacggctcctggaaagaagaggcctgtagagcagtctcctcaggaaccggactcctccgcgggtattggcaaatcgggtgcacagcccgctaaaaagagactcaatttcggtcagactggcgacacagagtcagtcccagaccctcaaccaatcggagaacctcccgcagccccctcaggtgtgggatctcttacaatggcttcaggtggtggcgcaccagtggcagacaataacgaaggtgccgatggagtgggtagttcctcgggaaattggcattgcgattcccaatggctgggggacagagtcatcaccaccagcacccgaacctgggccctgcccacctacaacaatcacctctacaagcaaatctccaacagcacatctggaggatcttcaaatgacaacgcctacttcggctacagcaccccctgggggtattttgacttcaacagattccactgccacttctcaccacgtgactggcagcgactcatcaacaacaactggggattccggcctaagcgactcaacttcaagctcttcaacattcaggtcaaagaggttacggacaacaatggagtcaagaccatcgccaataaccttaccagcacggtccaggtcttcacggactcagactatcagctcccgtacgtgctcgggtcggctcacgagggctgcctcccgccgttcccagcggacgttttcatgattcctcagtacgggtatctgacgcttaatgatggaagccaggccgtgggtcgttcgtccttttactgcctggaatatttcccgtcgcaaatgctaagaacgggtaacaacttccagttcagctacgagtttgagaacgtacctttccatagcagctacgctcacagccaaagcctggaccgactaatgaatccactcatcgaccaatacttgtactatctctcaaagactattaacggttctggacagaatcaacaaacgctaaaattcagtgtggccggacccagcaacatggctgtccagggaagaaactacatacctggacccagctaccgacaacaacgtgtctcaaccactgtgactcaaaacaacaacagcgaatttgcttggcctggagcttcttcttgggctctcaatggacgtaatagcttgatgaatcctggacctgctatggccagccacaaagaaggagaggaccgtttctttcctttgtctggatctttaatttttggcaaacaacagactggaagagacaacgtggatgcggacaaagtcatgataaccaacgaagaagaaattaaaactactaacccggtagcaacggagtcctatggacaagtggccacaaaccaccagagtgcccaagcacaggcgcagaccggctgggttcaaaaccaaggaatacttccgggtatggtttggcaggacagagatgtgtacctgcaaggacccatttgggccaaaattcctcacacggacggcaactttcacccttctccgctgatgggagggtttggaatgaagcacccgcctcctcagatcctcatcaaaaacacacctgtacctgcggatcctccaacggccttcaacaaggacaagctgaactctttcatcacccagtattctactggccaagtcagcgtggagatcgagtgggagctgcagaaggaaaacagcaagcgctggaacccggagatccagtacacttccaactattacaagtctaataatgttgaatttgctgttaatactgaaggtgtatatagtgaaccccgccccattggcaccagatacctgactcgtaatctg

SEQ ID NO: 4 - protein, 736 aa, synthetic construct
  REGION 1..736: note = Adeno Associated Virus Capsid Protein Variant
MAADGYLPDWLEDNLSEGIREWWALKPGAPQPKANQQHQDNARGLVLPGYKYLGPGNGLDKGEPVNAADAAALEHDKAYDQQLKAGDNPYLKYNHADAEFQERLKEDTSFGGNLGRAVFQAKKRLLEPLGLVEEAAKTAPGKKRPVEQSPQEPDSSAGIGKSGAQPAKKRLNFGQTGDTESVPDPQPIGEPPAAPSGVGSLTMASGGGAPVADNNEGADGVGSSSGNWHCDSQWLGDRVITTSTRTWALPTYNNHLYKQISNSTSGGSSNDNAYFGYSTPWGYFDFNRFHCHFSPRDWQRLINNNWGFRPKRLNFKLFNIQVKEVTDNNGVKTIANNLTSTVQVFTDSDYQLPYVLGSAHEGCLPPFPADVFMIPQYGYLTLNDGSQAVGRSSFYCLEYFPSQMLRTGNNFQFSYEFENVPFHSSYAHSQSLDRLMNPLIDQYLYYLSKTINGSGQNQQTLKFSVAGPSNMAVQGRNYIPGPSYRQQRVSTTVTQNNNSEFAWPGASSWALNGRNSLMNPGPAMASHKEGEDRFFPLSGSLIFGKQQTGRDNVDADKVMITNEEEIKTTNPVATESYGQVATNHQSAQAQAQTGWVQNQGILPGMVWQDRDVYLQGPIWAKIPHTDGNFHPSPLMGGFGMKHPPPQILIKNTPVPADPPTAFNKDKLNSFITQYSTGQVSVEIEWELQKENSKRWNPEIQYTSNYYKSNNVEFAVNTEGVYSEPRPIGTRYLTRNL

SEQ ID NO: 5 - DNA, 2208 bp, synthetic construct
  misc_feature 1..2208: note = Adeno Associated Virus Capsid Protein Variant
  source 1..2208: mol_type = other DNA
atggctgccgatggttatcttccagattggctcgaggacaaccttagtgaaggaattcgcgagtggtgggctttgaaacctggagcccctcaacccaaggcaaatcaacaacatcaagacaacgctcgaggtcttgtgcttccgggttacaaataccttggacccggcaacggactcgacaagggggagccggtcaacgcagcagacgcggcggccctcgagcacgacaaggcctacgaccagcagctcaaggccggagacaacccgtacctcaagtacaaccacgccgacgccgagttccaggagcggctcaaagaagatacgtcttttgggggcaacctcgggcgagcagtcttccaggccaaaaagaggcttcttgaacctcttggtctggttgaggaagcggctaagacggctcctggaaagaagaggcctgtagagcagtctcctcaggaaccggactcctccgcgggtattggcaaatcgggtgcacagcccgctaaaaagagactcaatttcggtcagactggcgacacagagtcagtcccagaccctcaaccaatcggagaacctcccgcagccccctcaggtgtgggatctcttacaatggcttcaggtggtggcgcaccagtggcagacaataacgaaggtgccgatggagtgggtagttcctcgggaaattggcattgcgattcccaatggctgggggacagagtcatcaccaccagcacccgaacctgggccctgcccacctacaacaatcacctctacaagcaaatctccaacagcacatctggaggatcttcaaatgacaacgcctacttcggctacagcaccccctgggggtattttgacttcaacagattccactgccacttctcaccacgtgactggcagcgactcatcaacaacaactggggattccggcctaagcgactcaacttcaagctcttcaacattcaggtcaaagaggttacggacaacaatggagtcaagaccatcgccaataaccttaccagcacggtccaggtcttcacggactcagactatcagctcccgtacgtgctcgggtcggctcacgagggctgcctcccgccgttcccagcggacgttttcatgattcctcagtacgggtatctgacgcttaatgatggaagccaggccgtgggtcgttcgtccttttactgcctggaatatttcccgtcgcaaatgctaagaacgggtaacaacttccagttcagctacgagtttgagaacgtacctttccatagcagctacgctcacagccaaagcctggaccgactaatgaatccactcatcgaccaatacttgtactatctctcaaagactattaacaggtctggacagaatcaacaaacgctaaaattcagtgtggccggacccagcaacatggctgtccagggaagaaactacatacctggacccagctaccgacaacaacgtgtctcaaccactgtgactcaaaacaacaacagcgaatttgcttggcctggagcttcttcttgggctctcaatggacgtaatagcttgatgaatcctggacctgctatggccagccacaaagaaggagaggaccgtttctttcctttgtctggatctttaatttttggcaaacaaggaactggaagagacaacgtggatgcggacaaagtcatgataaccaacgaagaagaaattaaaactactaacccggtagcaacggagtcctatggacaagtggccacaaaccaccagagtgcccaagcacaggcgcagaccggctgggttcaaaaccaaggaatacttccgggtatggtttggcaggacagagatgtgtacctgcaaggacccatttgggccaaaattcctcacacggacggcaactttcacccttctccgctgatgggagggtttggaatgaagcacccgcctcctcagatcctcatcaaaaacacacctgtacctgcggatcctccaacggccttcaacaaggacaagctgaactctttcatcacccagtattctactggccaagtcagcgtggagatcgagtgggagctgcagaaggaaaacagcaagcgctggaacccggagatccagtacacttccaactattacaagtctaataatgttgaatttgctgttaatactgaaggtgtatatagtgaaccccgccccattggcaccagatacctgactcgtaatctg

SEQ ID NO: 6 - protein, 736 aa, synthetic construct
  REGION 1..736: note = Adeno Associated Virus Capsid Protein Variant
MAADGYLPDWLEDNLSEGIREWWALKPGAPQPKANQQHQDNARGLVLPGYKYLGPGNGLDKGEPVNAADAAALEHDKAYDQQLKAGDNPYLKYNHADAEFQERLKEDTSFGGNLGRAVFQAKKRLLEPLGLVEEAAKTAPGKKRPVEQSPQEPDSSAGIGKSGAQPAKKRLNFGQTGDTESVPDPQPIGEPPAAPSGVGSLTMASGGGAPVADNNEGADGVGSSSGNWHCDSQWLGDRVITTSTRTWALPTYNNHLYKQISNSTSGGSSNDNAYFGYSTPWGYFDFNRFHCHFSPRDWQRLINNNWGFRPKRLNFKLFNIQVKEVTDNNGVKTIANNLTSTVQVFTDSDYQLPYVLGSAHEGCLPPFPADVFMIPQYGYLTLNDGSQAVGRSSFYCLEYFPSQMLRTGNNFQFSYEFENVPFHSSYAHSQSLDRLMNPLIDQYLYYLSKTINRSGQNQQTLKFSVAGPSNMAVQGRNYIPGPSYRQQRVSTTVTQNNNSEFAWPGASSWALNGRNSLMNPGPAMASHKEGEDRFFPLSGSLIFGKQGTGRDNVDADKVMITNEEEIKTTNPVATESYGQVATNHQSAQAQAQTGWVQNQGILPGMVWQDRDVYLQGPIWAKIPHTDGNFHPSPLMGGFGMKHPPPQILIKNTPVPADPPTAFNKDKLNSFITQYSTGQVSVEIEWELQKENSKRWNPEIQYTSNYYKSNNVEFAVNTEGVYSEPRPIGTRYLTRNL

SEQ ID NO: 7 - DNA, 2208 bp, synthetic construct
  misc_feature 1..2208: note = Adeno Associated Virus Capsid Protein Variant
  source 1..2208: mol_type = other DNA
atggctgccgatggttatcttccagattggctcgaggacaaccttagtgaaggaattcgcgagtggtgggctttgaaacctggagcccctcaacccaaggcaaatcaacaacatcaagacaacgctcgaggtcttgtgcttccgggttacaaataccttggacccggcaacggactcgacaagggggagccggtcaacgcagcagacgcggcggccctcgagcacgacaaggcctacgaccagcagctcaaggccggagacaacccgtacctcaagtacaaccacgccgacgccgagttccaggagcggctcaaagaagatacgtcttttgggggcaacctcgggcgagcagtcttccaggccaaaaagaggcttcttgaacctcttggtctggttgaggaagcggctaagacggctcctggaaagaagaggcctgtagagcagtctcctcaggaaccggactcctccgcgggtattggcaaatcgggtgcacagcccgctaaaaagagactcaatttcggtcagactggcgacacagagtcagtcccagaccctcaaccaatcggagaacctcccgcagccccctcaggtgtgggatctcttacaatggcttcaggtggtggcgcaccagtggcagacaataacgaaggtgccgatggagtgggtagttcctcgggaaattggcattgcgattcccaatggctgggggacagagtcatcaccaccagcacccgaacctgggccctgcccacctacaacaatcacctctacaagcaaatctccaacagcacatctggaggatcttcaaatgacaacgcctacttcggctacagcaccccctgggggtattttgacttcaacagattccactgccacttctcaccacgtgactggcagcgactcatcaacaacaactggggattccggcctaagcgactcaacttcaagctcttcaacattcaggtcaaagaggttacggacaacaatggagtcaagaccatcgccaataaccttaccagcacggtccaggtcttcacggactcagactatcagctcccgtacgtgctcgggtcggctcacgagggctgcctcccgccgttcccagcggacgttttcatgattcctcagtacgggtatctgacgcttaatgatggaagccaggccgtgggtcgttcgtccttttactgcctggaatatttcccgtcgcaaatgctaagaacgggtaacaacttccagttcagctacgagtttgagaacgtacctttccatagcagctacgctcacagccaaagcctggaccgactaatgaatccactcatcgaccaatacttgtactatctctcaaagactattaacggttctggacagaatcaacaaacgctaaaattcagtgtggccggacccagcaacatggctgtccagggaagaaactacatacctggacccagctaccgacaacaacgtgtctcaaccactgtgactcaaaacaacaacagcgaatttgcttggcctggagcttcttcttgggctctcaatggacgtaatagcttgatgaatcctggacctgctatggccagccacaaagaaggagaggaccgtttctttcctttgtctggatctttaatttttggcaaacaagagactggaagagacaacgtggatgcggacaaagtcatgataaccaacgaagaagaaattaaaactactaacccggtagcaacggagtcctatggacaagtggccacaaaccaccagagtgcccaagcacaggcgcagaccggctgggttcaaaaccaaggaatacttccgggtatggtttggcaggacagagatgtgtacctgcaaggacccatttgggccaaaattcctcacacggacggcaactttcacccttctccgctgatgggagggtttggaatgaagcacccgcctcctcagatcctcatcaaaaacacacctgtacctgcggatcctccaacggccttcaacaaggacaagctgaactctttcatcacccagtattctactggccaagtcagcgtggagatcgagtgggagctgcagaaggaaaacagcaagcgctggaacccggagatccagtacacttccaactattacaagtctaataatgttgaatttgctgttaatactgaaggtgtatatagtgaaccccgccccattggcaccagatacctgactcgtaatctg

SEQ ID NO: 8 - protein, 736 aa, synthetic construct
  REGION 1..736: note = Adeno Associated Virus Capsid Protein Variant
MAADGYLPDWLEDNLSEGIREWWALKPGAPQPKANQQHQDNARGLVLPGYKYLGPGNGLDKGEPVNAADAAALEHDKAYDQQLKAGDNPYLKYNHADAEFQERLKEDTSFGGNLGRAVFQAKKRLLEPLGLVEEAAKTAPGKKRPVEQSPQEPDSSAGIGKSGAQPAKKRLNFGQTGDTESVPDPQPIGEPPAAPSGVGSLTMASGGGAPVADNNEGADGVGSSSGNWHCDSQWLGDRVITTSTRTWALPTYNNHLYKQISNSTSGGSSNDNAYFGYSTPWGYFDFNRFHCHFSPRDWQRLINNNWGFRPKRLNFKLFNIQVKEVTDNNGVKTIANNLTSTVQVFTDSDYQLPYVLGSAHEGCLPPFPADVFMIPQYGYLTLNDGSQAVGRSSFYCLEYFPSQMLRTGNNFQFSYEFENVPFHSSYAHSQSLDRLMNPLIDQYLYYLSKTINGSGQNQQTLKFSVAGPSNMAVQGRNYIPGPSYRQQRVSTTVTQNNNSEFAWPGASSWALNGRNSLMNPGPAMASHKEGEDRFFPLSGSLIFGKQETGRDNVDADKVMITNEEEIKTTNPVATESYGQVATNHQSAQAQAQTGWVQNQGILPGMVWQDRDVYLQGPIWAKIPHTDGNFHPSPLMGGFGMKHPPPQILIKNTPVPADPPTAFNKDKLNSFITQYSTGQVSVEIEWELQKENSKRWNPEIQYTSNYYKSNNVEFAVNTEGVYSEPRPIGTRYLTRNL

SEQ ID NO: 9 - DNA, 2208 bp, synthetic construct
  misc_feature 1..2208: note = Adeno Associated Virus Capsid Protein Variant
  source 1..2208: mol_type = other DNA
atggctgccgatggttatcttccagattggctcgaggacaaccttagtgaaggaattcgcgagtggtgggctttgaaacctggagcccctcaacccaaggcaaatcaacaacatcaagacaacgctcgaggtcttgtgcttccgggttacaaataccttggacccggcaacggactcgacaagggggagccggtcaacgcagcagacgcggcggccctcgagcacgacaaggcctacgaccagcagctcaaggccggagacaacccgtacctcaagtacaaccacgccgacgccgagttccaggagcggctcaaagaagatacgtcttttgggggcaacctcgggcgagcagtcttccaggccaaaaagaggcttcttgaacctcttggtctggttgaggaagcggctaagacggctcctggaaagaagaggcctgtagagcagtctcctcaggaaccggactcctccgcgggtattggcaaatcgggtgcacagcccgctaaaaagagactcaatttcggtcagactggcgacacagagtcagtcccagaccctcaaccaatcggagaacctcccgcagccccctcaggtgtgggatctcttacaatggcttcaggtggtggcgcaccagtggcagacaataacgaaggtgccgatggagtgggtagttcctcgggaaattggcattgcgattcccaatggctgggggacagagtcatcaccaccagcacccgaacctgggccctgcccacctacaacaatcacctctacaagcaaatctccaacagcacatctggaggatcttcaaatgacaacgcctacttcggctacagcaccccctgggggtattttgacttcaacagattccactgccacttctcaccacgtgactggcagcgactcatcaacaacaactggggattccggcctaagcgactcaacttcaagctcttcaacattcaggtcaaagaggttacggacaacaatggagtcaagaccatcgccaataaccttaccagcacggtccaggtcttcacggactcagactatcagctcccgtacgtgctcgggtcggctcacgagggctgcctcccgccgttcccagcggacgttttcatgattcctcagtacgggtatctgacgcttaatgatggaagccaggccgtgggtcgttcgtccttttactgcctggaatatttcccgtcgcaaatgctaagaacgggtaacaacttccagttcagctacgagtttgagaacgtacctttccatagcagctacgctcacagccaaagcctggaccgactaatgaatccactcatcgaccaatacttgtactatctctcaaagactattaacggttctggacagaatcaacaaacgctaaaattcagtgtggccggacccagcaacatggctgtccagggaagaaactacatacctggacccagctaccgacaacaacgtgtctcaaccactgtgactcaaaacaacaacagcgaatttgcttggcctggagcttcttcttgggctctcaatggacgtaatagcttgatgaatcctggacctgctatggccagccacaaagaaggagaggaccgtttctttcctttgtctggatctttaatttttggcaaacaaggaactggaagagacaacgtggattgggacaaagtcatgataaccaacgaagaagaaattaaaactactaacccggtagcaacggagtcctatggacaagtggccacaaaccaccagagtgcccaagcacaggcgcagaccggctgggttcaaaaccaaggaatacttccgggtatggtttggcaggacagagatgtgtacctgcaaggacccatttgggccaaaattcctcacacggacggcaactttcacccttctccgctgatgggagggtttggaatgaagcacccgcctcctcagatcctcatcaaaaacacacctgtacctgcggatcctccaacggccttcaacaaggacaagctgaactctttcatcacccagtattctactggccaagtcagcgtggagatcgagtgggagctgcagaaggaaaacagcaagcgctggaacccggagatccagtacacttccaactattacaagtctaataatgttgaatttgctgttaatactgaaggtgtatatagtgaaccccgccccattggcaccagatacctgactcgtaatctg

SEQ ID NO: 10 - protein, 736 aa, synthetic construct
  REGION 1..736: note = Adeno Associated Virus Capsid Protein Variant
MAADGYLPDWLEDNLSEGIREWWALKPGAPQPKANQQHQDNARGLVLPGYKYLGPGNGLDKGEPVNAADAAALEHDKAYDQQLKAGDNPYLKYNHADAEFQERLKEDTSFGGNLGRAVFQAKKRLLEPLGLVEEAAKTAPGKKRPVEQSPQEPDSSAGIGKSGAQPAKKRLNFGQTGDTESVPDPQPIGEPPAAPSGVGSLTMASGGGAPVADNNEGADGVGSSSGNWHCDSQWLGDRVITTSTRTWALPTYNNHLYKQISNSTSGGSSNDNAYFGYSTPWGYFDFNRFHCHFSPRDWQRLINNNWGFRPKRLNFKLFNIQVKEVTDNNGVKTIANNLTSTVQVFTDSDYQLPYVLGSAHEGCLPPFPADVFMIPQYGYLTLNDGSQAVGRSSFYCLEYFPSQMLRTGNNFQFSYEFENVPFHSSYAHSQSLDRLMNPLIDQYLYYLSKTINGSGQNQQTLKFSVAGPSNMAVQGRNYIPGPSYRQQRVSTTVTQNNNSEFAWPGASSWALNGRNSLMNPGPAMASHKEGEDRFFPLSGSLIFGKQGTGRDNVDWDKVMITNEEEIKTTNPVATESYGQVATNHQSAQAQAQTGWVQNQGILPGMVWQDRDVYLQGPIWAKIPHTDGNFHPSPLMGGFGMKHPPPQILIKNTPVPADPPTAFNKDKLNSFITQYSTGQVSVEIEWELQKENSKRWNPEIQYTSNYYKSNNVEFAVNTEGVYSEPRPIGTRYLTRNL

SEQ ID NO: 11 - DNA, 2208 bp, synthetic construct
  misc_feature 1..2208: note = Adeno Associated Virus Capsid Protein Variant
  source 1..2208: mol_type = other DNA
atggctgccgatggttatcttccagattggctcgaggacaaccttagtgaaggaattcgcgagtggtgggctttgaaacctggagcccctcaacccaaggcaaatcaacaacatcaagacaacgctcgaggtcttgtgcttccgggttacaaataccttggacccggcaacggactcgacaagggggagccggtcaacgcagcagacgcggcggccctcgagcacgacaaggcctacgaccagcagctcaaggccggagacaacccgtacctcaagtacaaccacgccgacgccgagttccaggagcggctcaaagaagatacgtcttttgggggcaacctcgggcgagcagtcttccaggccaaaaagaggcttcttgaacctcttggtctggttgaggaagcggctaagacggctcctggaaagaagaggcctgtagagcagtctcctcaggaaccggactcctccgcgggtattggcaaatcgggtgcacagcccgctaaaaagagactcaatttcggtcagactggcgacacagagtcagtcccagaccctcaaccaatcggagaacctcccgcagccccctcaggtgtgggatctcttacaatggcttcaggtggtggcgcaccagtggcagacaataacgaaggtgccgatggagtgggtagttcctcgggaaattggcattgcgattcccaatggctgggggacagagtcatcaccaccagcacccgaacctgggccctgcccacctacaacaatcacctctacaagcaaatctccaacagcacatctggaggatcttcaaatgacaacgcctacttcggctacagcaccccctgggggtattttgacttcaacagattccactgccacttctcaccacgtgactggcagcgactcatcaacaacaactggggattccggcctaagcgactcaacttcaagctcttcaacattcaggtcaaagaggttacggacaacaatggagtcaagaccatcgccaataaccttaccagcacggtccaggtcttcacggactcagactatcagctcccgtacgtgctcgggtcggctcacgagggctgcctcccgccgttcccagcggacgttttcatgattcctcagtacgggtatctgacgcttaatgatggaagccaggccgtgggtcgttcgtccttttactgcctggaatatttcccgtcgcaaatgctaagaacgggtaacaacttccagttcagctacgagtttgagaacgtacctttccatagcagctacgctcacagccaaagcctggaccgactaatgaatccactcatcgaccaatacttgtactatctctcaaagactattaacggttctggacagaatcaacaaacgctaaaattcagtgtggccggacccagcaacatggctgtccagggaagaaactacatacctggacccagctaccgacaacaacgtgtctcaaccactgtgactcaaaacaacaacagcgaatttgcttggcctggagcttcttcttgggctctcaatggacgtaatagcttgatgaatcctggacctgctatggccagccacaaagaaggagaggaccgtttcgcgcctttgtctggatctttaatttttggcaaacaaggaactggaagagacaacgtggatgcggacaaagtcatgataaccaacgaagaagaaattaaaactactaacccggtagcaacggagtcctatggacaagtggccacaaaccaccagagtgcccaagcacaggcgcagaccggctgggttcaaaaccaaggaatacttccgggtatggtttggcaggacagagatgtgtacctgcaaggacccatttgggccaaaattcctcacacggacggcaactttcacccttctccgctgatgggagggtttggaatgaagcacccgcctcctcagatcctcatcaaaaacacacctgtacctgcggatcctccaacggccttcaacaaggacaagctgaactctttcatcacccagtattctactggccaagtcagcgtggagatcgagtgggagctgcagaaggaaaacagcaagcgctggaacccggagatccagtacacttccaactattacaagtctaataatgttgaatttgctgttaatactgaaggtgtatatagtgaaccccgccccattggcaccagatacctgactcgtaatctg

SEQ ID NO: 12 - protein, 736 aa, synthetic construct
  REGION 1..736: note = Adeno Associated Virus Capsid Protein Variant
MAADGYLPDWLEDNLSEGIREWWALKPGAPQPKANQQHQDNARGLVLPGYKYLGPGNGLDKGEPVNAADAAALEHDKAYDQQLKAGDNPYLKYNHADAEFQERLKEDTSFGGNLGRAVFQAKKRLLEPLGLVEEAAKTAPGKKRPVEQSPQEPDSSAGIGKSGAQPAKKRLNFGQTGDTESVPDPQPIGEPPAAPSGVGSLTMASGGGAPVADNNEGADGVGSSSGNWHCDSQWLGDRVITTSTRTWALPTYNNHLYKQISNSTSGGSSNDNAYFGYSTPWGYFDFNRFHCHFSPRDWQRLINNNWGFRPKRLNFKLFNIQVKEVTDNNGVKTIANNLTSTVQVFTDSDYQLPYVLGSAHEGCLPPFPADVFMIPQYGYLTLNDGSQAVGRSSFYCLEYFPSQMLRTGNNFQFSYEFENVPFHSSYAHSQSLDRLMNPLIDQYLYYLSKTINGSGQNQQTLKFSVAGPSNMAVQGRNYIPGPSYRQQRVSTTVTQNNNSEFAWPGASSWALNGRNSLMNPGPAMASHKEGEDRFAPLSGSLIFGKQGTGRDNVDADKVMITNEEEIKTTNPVATESYGQVATNHQSAQAQAQTGWVQNQGILPGMVWQDRDVYLQGPIWAKIPHTDGNFHPSPLMGGFGMKHPPPQILIKNTPVPADPPTAFNKDKLNSFITQYSTGQVSVEIEWELQKENSKRWNPEIQYTSNYYKSNNVEFAVNTEGVYSEPRPIGTRYLTRNL

SEQ ID NO: 13 - DNA, 2208 bp, synthetic construct
  misc_feature 1..2208: note = Adeno Associated Virus Capsid Protein Variant
  source 1..2208: mol_type = other DNA
atggctgccgatggttatcttccagattggctcgaggacaaccttagtgaaggaattcgcgagtggtgggctttgaaacctggagcccctcaacccaaggcaaatcaacaacatcaagacaacgctcgaggtcttgtgcttccgggttacaaataccttggacccggcaacggactcgacaagggggagccggtcaacgcagcagacgcggcggccctcgagcacgacaaggcctacgaccagcagctcaaggccggagacaacccgtacctcaagtacaaccacgccgacgccgagttccaggagcggctcaaagaagatacgtcttttgggggcaacctcgggcgagcagtcttccaggccaaaaagaggcttcttgaacctcttggtctggttgaggaagcggctaagacggctcctggaaagaagaggcctgtagagcagtctcctcaggaaccggactcctccgcgggtattggcaaatcgggtgcacagcccgctaaaaagagactcaatttcggtcagactggcgacacagagtcagtcccagaccctcaaccaatcggagaacctcccgcagccccctcaggtgtgggatctcttacaatggcttcaggtggtggcgcaccagtggcagacaataacgaaggtgccgatggagtgggtagttcctcgggaaattggcattgcgattcccaatggctgggggacagagtcatcaccaccagcacccgaacctgggccctgcccacctacaacaatcacctctacaagcaaatctccaacagcacatctggaggatcttcaaatgacaacgcctacttcggctacagcaccccctgggggtattttgacttcaacagattccactgccacttctcaccacgtgactggcagcgactcatcaacaacaactggggattccggcctaagcgactcaacttcaagctcttcaacattcaggtcaaagaggttacggacaacaatggagtcaagaccatcgccaataaccttaccagcacggtccaggtcttcacggactcagactatcagctcccgtacgtgctcgggtcggctcacgagggctgcctcccgccgttcccagcggacgttttcatgattcctcagtacgggtatctgacgcttaatgatggaagccaggccgtgggtcgttcgtccttttactgcctggaatatttcccgtcgcaaatgctaagaacgggtaacaacttccagttcagctacgagtttgagaacgtacctttccatagcagctacgctcacagccaaagcctggaccgactaatgaatccactcatcgaccaatacttgtactatctctcaaagactattaacggttctggacagaatcaacaaacgctaaaattcagtgtggccggacccagcaacatggctgtccagggaagaaactacatacctggacccagctaccgacaacaacgtgtctcaaccactgtgactcaaaacaacaacagcgaaatggcttggcctggagcttcttcttgggctctcaatggacgtaatagcttgatgaatcctggacctgctatggccagccacaaagaaggagaggaccgtttctttcctttgtctggatctttaatttttggcaaacaaggaactggaagagacaacgtggatgcggacaaagtcatgataaccaacgaagaagaaattaaaactactaacccggtagcaacggagtcctatggacaagtggccacaaaccaccagagtgcccaagcacaggcgcagaccggctgggttcaaaaccaaggaatacttccgggtatggtttggcaggacagagatgtgtacctgcaaggacccatttgggccaaaattcctcacacggacggcaactttcacccttctccgctgatgggagggtttggaatgaagcacccgcctcctcagatcctcatcaaaaacacacctgtacctgcggatcctccaacggccttcaacaaggacaagctgaactctttcatcacccagtattctactggccaagtcagcgtggagatcgagtgggagctgcagaaggaaaacagcaagcgctggaacccggagatccagtacacttccaactattacaagtctaataatgttgaatttgctgttaatactgaaggtgtatatagtgaaccccgccccattggcaccagatacctgactcgtaatctg

SEQ ID NO: 14 - protein, 736 aa, synthetic construct
  REGION 1..736: note = Adeno Associated Virus Capsid Protein Variant
MAADGYLPDWLEDNLSEGIREWWALKPGAPQPKANQQHQDNARGLVLPGYKYLGPGNGLDKGEPVNAADAAALEHDKAYDQQLKAGDNPYLKYNHADAEFQERLKEDTSFGGNLGRAVFQAKKRLLEPLGLVEEAAKTAPGKKRPVEQSPQEPDSSAGIGKSGAQPAKKRLNFGQTGDTESVPDPQPIGEPPAAPSGVGSLTMASGGGAPVADNNEGADGVGSSSGNWHCDSQWLGDRVITTSTRTWALPTYNNHLYKQISNSTSGGSSNDNAYFGYSTPWGYFDFNRFHCHFSPRDWQRLINNNWGFRPKRLNFKLFNIQVKEVTDNNGVKTIANNLTSTVQVFTDSDYQLPYVLGSAHEGCLPPFPADVFMIPQYGYLTLNDGSQAVGRSSFYCLEYFPSQMLRTGNNFQFSYEFENVPFHSSYAHSQSLDRLMNPLIDQYLYYLSKTINGSGQNQQTLKFSVAGPSNMAVQGRNYIPGPSYRQQRVSTTVTQNNNSEMAWPGASSWALNGRNSLMNPGPAMASHKEGEDRFFPLSGSLIFGKQGTGRDNVDADKVMITNEEEIKTTNPVATESYGQVATNHQSAQAQAQTGWVQNQGILPGMVWQDRDVYLQGPIWAKIPHTDGNFHPSPLMGGFGMKHPPPQILIKNTPVPADPPTAFNKDKLNSFITQYSTGQVSVEIEWELQKENSKRWNPEIQYTSNYYKSNNVEFAVNTEGVYSEPRPIGTRYLTRNL

SEQ ID NO: 15 - DNA, 2208 bp, synthetic construct
  misc_feature 1..2208: note = Adeno Associated Virus Capsid Protein Variant
  source 1..2208: mol_type = other DNA
atggctgccgatggttatcttccagattggctcgaggacaaccttagtgaaggaattcgcgagtggtgggctttgaaacctggagcccctcaacccaaggcaaatcaacaacatcaagacaacgctcgaggtcttgtgcttccgggttacaaataccttggacccggcaacggactcgacaagggggagccggtcaacgcagcagacgcggcggccctcgagcacgacaaggcctacgaccagcagctcaaggccggagacaacccgtacctcaagtacaaccacgccgacgccgagttccaggagcggctcaaagaagatacgtcttttgggggcaacctcgggcgagcagtcttccaggccaaaaagaggcttcttgaacctcttggtctggttgaggaagcggctaagacggctcctggaaagaagaggcctgtagagcagtctcctcaggaaccggactcctccgcgggtattggcaaatcgggtgcacagcccgctaaaaagagactcaatttcggtcagactggcgacacagagtcagtcccagaccctcaaccaatcggagaacctcccgcagccccctcaggtgtgggatctcttacaatggcttcaggtggtggcgcaccagtggcagacaataacgaaggtgccgatggagtgggtagttcctcgggaaattggcattgcgattcccaatggctgggggacagagtcatcaccaccagcacccgaacctgggccctgcccacctacaacaatcacctctacaagcaaatctccaacagcacatctggaggatcttcaaatgacaacgcctacttcggctacagcaccccctgggggtattttgacttcaacagattccactgccacttctcaccacgtgactggcagcgactcatcaacaacaactggggattccggcctaagcgactcaacttcaagctcttcaacattcaggtcaaagaggttacggacaacaatggagtcaagaccatcgccaataaccttaccagcacggtccaggtcttcacggactcagactatcagctcccgtacgtgctcgggtcggctcacgagggctgcctcccgccgttcccagcggacgttttcatgattcctcagtacgggtatctgacgcttaatgatggaagccaggccgtgggtcgttcgtccttttactgcctggaatatttcccgtcgcaaatgctaagaacgggtaacaacttccagttcagctacgagtttgagaacgtacctttccatagcagctacgctcacagccaaagcctggaccgactaatgaatccactcatcgaccaatacttgtactatctctcaaagactattaacggttctggacagaatcaacaaacgctaaaattcagtgtggccggacccagcaacatggctgtccagggaagaaactacatacctggacccagctaccgacaacaacgtgtctcaaccactgtgactcaaaacaacaacagcgaatttgcttggcctggagcttcttcttgggctctcaatggacgtaatagcttgatgaatcctggacctgctatggccagccacaaagaaggagaggaccgtttctttcctttgtctggatctttaatttttggcaaacaaggaactggaagagacaacgtggatagggacaaagtcatgataaccaacgaagaagaaattaaaactactaacccggtagcaacggagtcctatggacaagtggccacaaaccaccagagtgcccaagcacaggcgcagaccggctgggttcaaaaccaaggaatacttccgggtatggtttggcaggacagagatgtgtacctgcaaggacccatttgggccaaaattcctcacacggacggcaactttcacccttctccgctgatgggagggtttggaatgaagcacccgcctcctcagatcctcatcaaaaacacacctgtacctgcggatcctccaacggccttcaacaaggacaagctgaactctttcatcacccagtattctactggccaagtcagcgtggagatcgagtgggagctgcagaaggaaaacagcaagcgctggaacccggagatccagtacacttccaactattacaagtctaataatgttgaatttgctgttaatactgaaggtgtatatagtgaaccccgccccattggcaccagatacctgactcgtaatctg

SEQ ID NO: 16 - protein, 736 aa, synthetic construct
  REGION 1..736: note = Adeno Associated Virus Capsid Protein Variant
MAADGYLPDWLEDNLSEGIREWWALKPGAPQPKANQQHQDNARGLVLPGYKYLGPGNGLDKGEPVNAADAAALEHDKAYDQQLKAGDNPYLKYNHADAEFQERLKEDTSFGGNLGRAVFQAKKRLLEPLGLVEEAAKTAPGKKRPVEQSPQEPDSSAGIGKSGAQPAKKRLNFGQTGDTESVPDPQPIGEPPAAPSGVGSLTMASGGGAPVADNNEGADGVGSSSGNWHCDSQWLGDRVITTSTRTWALPTYNNHLYKQISNSTSGGSSNDNAYFGYSTPWGYFDFNRFHCHFSPRDWQRLINNNWGFRPKRLNFKLFNIQVKEVTDNNGVKTIANNLTSTVQVFTDSDYQLPYVLGSAHEGCLPPFPADVFMIPQYGYLTLNDGSQAVGRSSFYCLEYFPSQMLRTGNNFQFSYEFENVPFHSSYAHSQSLDRLMNPLIDQYLYYLSKTINGSGQNQQTLKFSVAGPSNMAVQGRNYIPGPSYRQQRVSTTVTQNNNSEFAWPGASSWALNGRNSLMNPGPAMASHKEGEDRFFPLSGSLIFGKQGTGRDNVDRDKVMITNEEEIKTTNPVATESYGQVATNHQSAQAQAQTGWVQNQGILPGMVWQDRDVYLQGPIWAKIPHTDGNFHPSPLMGGFGMKHPPPQILIKNTPVPADPPTAFNKDKLNSFITQYSTGQVSVEIEWELQKENSKRWNPEIQYTSNYYKSNNVEFAVNTEGVYSEPRPIGTRYLTRNL

SEQ ID NO: 17 - DNA, 2208 bp, synthetic construct
  misc_feature 1..2208: note = Adeno Associated Virus Capsid Protein Variant
  source 1..2208: mol_type = other DNA
atggctgccgatggttatcttccagattggctcgaggacaaccttagtgaaggaattcgcgagtggtgggctttgaaacctggagcccctcaacccaaggcaaatcaacaacatcaagacaacgctcgaggtcttgtgcttccgggttacaaataccttggacccggcaacggactcgacaagggggagccggtcaacgcagcagacgcggcggccctcgagcacgacaaggcctacgaccagcagctcaaggccggagacaacccgtacctcaagtacaaccacgccgacgccgagttccaggagcggctcaaagaagatacgtcttttgggggcaacctcgggcgagcagtcttccaggccaaaaagaggcttcttgaacctcttggtctggttgaggaagcggctaagacggctcctggaaagaagaggcctgtagagcagtctcctcaggaaccggactcctccgcgggtattggcaaatcgggtgcacagcccgctaaaaagagactcaatttcggtcagactggcgacacagagtcagtcccagaccctcaaccaatcggagaacctcccgcagccccctcaggtgtgggatctcttacaatggcttcaggtggtggcgcaccagtggcagacaataacgaaggtgccgatggagtgggtagttcctcgggaaattggcattgcgattcccaatggctgggggacagagtcatcaccaccagcacccgaacctgggccctgcccacctacaacaatcacctctacaagcaaatctccaacagcacatctggaggatcttcaaatgacaacgcctacttcggctacagcaccccctgggggtattttgacttcaacagattccactgccacttctcaccacgtgactggcagcgactcatcaacaacaactggggattccggcctaagcgactcaacttcaagctcttcaacattcaggtcaaagaggttacggacaacaatggagtcaagaccatcgccaataaccttaccagcacggtccaggtcttcacggactcagactatcagctcccgtacgtgctcgggtcggctcacgagggctgcctcccgccgttcccagcggacgttttcatgattcctcagtacgggtatctgacgcttaatgatggaagccaggccgtgggtcgttcgtccttttactgcctggaatatttcccgtcgcaaatgctaagaacgggtaacaacttccagttcagctacgagtttgagaacgtacctttccatagcagctacgctcacagccaaagcctggaccgactaatgaatccactcatcgaccaatacttgtactatctctcaaagactattaacggttctggacttaatcaacaaacgctaaaattcagtgtggccggacccagcaacatggctgtccagggaagaaactacatacctggacccagctaccgacaacaacgtgtctcaaccactgtgactcaaaacaacaacagcgaatttgcttggcctggagcttcttcttgggctctcaatggacgtaatagcttgatgaatcctggacctgctatggccagccacaaagaaggagaggaccgtttctttcctttgtctggatctttaatttttggcaaacaaggaactggaagagacaacgtggatgcggacaaagtcatgataaccaacgaagaagaaattaaaactactaacccggtagcaacggagtcctatggacaagtggccacaaaccaccagagtgcccaagcacaggcgcagaccggctgggttcaaaaccaaggaatacttccgggtatggtttggcaggacagagatgtgtacctgcaaggacccatttgggccaaaattcctcacacggacggcaactttcacccttctccgctgatgggagggtttggaatgaagcacccgcctcctcagatcctcatcaaaaacacacctgtacctgcggatcctccaacggccttcaacaaggacaagctgaactctttcatcacccagtattctactggccaagtcagcgtggagatcgagtgggagctgcagaaggaaaacagcaagcgctggaacccggagatccagtacacttccaactattacaagtctaataatgttgaatttgctgttaatactgaaggtgtatatagtgaaccccgccccattggcaccagatacctgactcgtaatctg

SEQ ID NO: 18 - protein, 736 aa, synthetic construct
  REGION 1..736: note = Adeno Associated Virus Capsid Protein Variant
MAADGYLPDWLEDNLSEGIREWWALKPGAPQPKANQQHQDNARGLVLPGYKYLGPGNGLDKGEPVNAADAAALEHDKAYDQQLKAGDNPYLKYNHADAEFQERLKEDTSFGGNLGRAVFQAKKRLLEPLGLVEEAAKTAPGKKRPVEQSPQEPDSSAGIGKSGAQPAKKRLNFGQTGDTESVPDPQPIGEPPAAPSGVGSLTMASGGGAPVADNNEGADGVGSSSGNWHCDSQWLGDRVITTSTRTWALPTYNNHLYKQISNSTSGGSSNDNAYFGYSTPWGYFDFNRFHCHFSPRDWQRLINNNWGFRPKRLNFKLFNIQVKEVTDNNGVKTIANNLTSTVQVFTDSDYQLPYVLGSAHEGCLPPFPADVFMIPQYGYLTLNDGSQAVGRSSFYCLEYFPSQMLRTGNNFQFSYEFENVPFHSSYAHSQSLDRLMNPLIDQYLYYLSKTINGSGLNQQTLKFSVAGPSNMAVQGRNYIPGPSYRQQRVSTTVTQNNNSEFAWPGASSWALNGRNSLMNPGPAMASHKEGEDRFFPLSGSLIFGKQGTGRDNVDADKVMITNEEEIKTTNPVATESYGQVATNHQSAQAQAQTGWVQNQGILPGMVWQDRDVYLQGPIWAKIPHTDGNFHPSPLMGGFGMKHPPPQILIKNTPVPADPPTAFNKDKLNSFITQYSTGQVSVEIEWELQKENSKRWNPEIQYTSNYYKSNNVEFAVNTEGVYSEPRPIGTRYLTRNL

SEQ ID NO: 19 - DNA, 2208 bp, synthetic construct
  misc_feature 1..2208: note = Adeno Associated Virus Capsid Protein Variant
  source 1..2208: mol_type = other DNA
atggctgccgatggttatcttccagattggctcgaggacaaccttagtgaaggaattcgcgagtggtgggctttgaaacctggagcccctcaacccaaggcaaatcaacaacatcaagacaacgctcgaggtcttgtgcttccgggttacaaataccttggacccggcaacggactcgacaagggggagccggtcaacgcagcagacgcggcggccctcgagcacgacaaggcctacgaccagcagctcaaggccggagacaacccgtacctcaagtacaaccacgccgacgccgagttccaggagcggctcaaagaagatacgtcttttgggggcaacctcgggcgagcagtcttccaggccaaaaagaggcttcttgaacctcttggtctggttgaggaagcggctaagacggctcctggaaagaagaggcctgtagagcagtctcctcaggaaccggactcctccgcgggtattggcaaatcgggtgcacagcccgctaaaaagagactcaatttcggtcagactggcgacacagagtcagtcccagaccctcaaccaatcggagaacctcccgcagccccctcaggtgtgggatctcttacaatggcttcaggtggtggcgcaccagtggcagacaataacgaaggtgccgatggagtgggtagttcctcgggaaattggcattgcgattcccaatggctgggggacagagtcatcaccaccagcacccgaacctgggccctgcccacctacaacaatcacctctacaagcaaatctccaacagcacatctggaggatcttcaaatgacaacgcctacttcggctacagcaccccctgggggtattttgacttcaacagattccactgccacttctcaccacgtgactggcagcgactcatcaacaacaactggggattccggcctaagcgactcaacttcaagctcttcaacattcaggtcaaagaggttacggacaacaatggagtcaagaccatcgccaataaccttaccagcacggtccaggtcttcacggactcagactatcagctcccgtacgtgctcgggtcggctcacgagggctgcctcccgccgttcccagcggacgttttcatgattcctcagtacgggtatctgacgcttaatgatggaagccaggccgtgggtcgttcgtccttttactgcctggaatatttcccgtcgcaaatgctaagaacgggtaacaacttccagttcagctacgagtttgagaacgtacctttccatagcagctacgctcacagccaaagcctggaccgactaatgaatccactcatcgaccaatacttgtactatctctcaaagactattaacggttctggacagaatcaacaaacgctaaaattcagtgtggccggacccagcaacatggctgtccagggaagaaactacatacctggacccagctaccgacaacaacgtgtctcaaccactgtgactcaaaacaacaacagcgaatttgcttggcctggagcttcttcttgggctctcaatggacgtaatagcttgatgaatcctggacctgctatggccagccacaaagaaggagaggaccgtttctttcctttgtctggatctttaatttttggcaaacaaggaactggagcggacaacgtggatgcggacaaagtcatgataaccaacgaagaagaaattaaaactactaacccggtagcaacggagtcctatggacaagtggccacaaaccaccagagtgcccaagcacaggcgcagaccggctgggttcaaaaccaaggaatacttccgggtatggtttggcaggacagagatgtgtacctgcaaggacccatttgggccaaaattcctcacacggacggcaactttcacccttctccgctgatgggagggtttggaatgaagcacccgcctcctcagatcctcatcaaaaacacacctgtacctgcggatcctccaacggccttcaacaaggacaagctgaactctttcatcacccagtattctactggccaagtcagcgtggagatcgagtgggagctgcagaaggaaaacagcaagcgctggaacccggagatccagtacacttccaactattacaagtctaataatgttgaatttgctgttaatactgaaggtgtatatagtgaaccccgccccattggcaccagatacctgactcgtaatctg

SEQ ID NO: 20 - protein, 736 aa, synthetic construct
  REGION 1..736: note = Adeno Associated Virus Capsid Protein Variant
MAADGYLPDWLEDNLSEGIREWWALKPGAPQPKANQQHQDNARGLVLPGYKYLGPGNGLDKGEPVNAADAAALEHDKAYDQQLKAGDNPYLKYNHADAEFQERLKEDTSFGGNLGRAVFQAKKRLLEPLGLVEEAAKTAPGKKRPVEQSPQEPDSSAGIGKSGAQPAKKRLNFGQTGDTESVPDPQPIGEPPAAPSGVGSLTMASGGGAPVADNNEGADGVGSSSGNWHCDSQWLGDRVITTSTRTWALPTYNNHLYKQISNSTSGGSSNDNAYFGYSTPWGYFDFNRFHCHFSPRDWQRLINNNWGFRPKRLNFKLFNIQVKEVTDNNGVKTIANNLTSTVQVFTDSDYQLPYVLGSAHEGCLPPFPADVFMIPQYGYLTLNDGSQAVGRSSFYCLEYFPSQMLRTGNNFQFSYEFENVPFHSSYAHSQSLDRLMNPLIDQYLYYLSKTINGSGQNQQTLKFSVAGPSNMAVQGRNYIPGPSYRQQRVSTTVTQNNNSEFAWPGASSWALNGRNSLMNPGPAMASHKEGEDRFFPLSGSLIFGKQGTGADNVDADKVMITNEEEIKTTNPVATESYGQVATNHQSAQAQAQTGWVQNQGILPGMVWQDRDVYLQGPIWAKIPHTDGNFHPSPLMGGFGMKHPPPQILIKNTPVPADPPTAFNKDKLNSFITQYSTGQVSVEIEWELQKENSKRWNPEIQYTSNYYKSNNVEFAVNTEGVYSEPRPIGTRYLTRNL

SEQ ID NO: 21 - DNA, 2208 bp, synthetic construct
  misc_feature 1..2208: note = Adeno Associated Virus Capsid Protein Variant
  source 1..2208: mol_type = other DNA
atggctgccgatggttatcttccagattggctcgaggacaaccttagtgaaggaattcgcgagtggtgggctttgaaacctggagcccctcaacccaaggcaaatcaacaacatcaagacaacgctcgaggtcttgtgcttccgggttacaaataccttggacccggcaacggactcgacaagggggagccggtcaacgcagcagacgcggcggccctcgagcacgacaaggcctacgaccagcagctcaaggccggagacaacccgtacctcaagtacaaccacgccgacgccgagttccaggagcggctcaaagaagatacgtcttttgggggcaacctcgggcgagcagtcttccaggccaaaaagaggcttcttgaacctcttggtctggttgaggaagcggctaagacggctcctggaaagaagaggcctgtagagcagtctcctcaggaaccggactcctccgcgggtattggcaaatcgggtgcacagcccgctaaaaagagactcaatttcggtcagactggcgacacagagtcagtcccagaccctcaaccaatcggagaacctcccgcagccccctcaggtgtgggatctcttacaatggcttcaggtggtggcgcaccagtggcagacaataacgaaggtgccgatggagtgggtagttcctcgggaaattggcattgcgattcccaatggctgggggacagagtcatcaccaccagcacccgaacctgggccctgcccacctacaacaatcacctctacaagcaaatctccaacagcacatctggaggatcttcaaatgacaacgcctacttcggctacagcaccccctgggggtattttgacttcaacagattccactgccacttctcaccacgtgactggcagcgactcatcaacaacaactggggattccggcctaagcgactcaacttcaagctcttcaacattcaggtcaaagaggttacggacaacaatggagtcaagaccatcgccaataaccttaccagcacggtccaggtcttcacggactcagactatcagctcccgtacgtgctcgggtcggctcacgagggctgcctcccgccgttcccagcggacgttttcatgattcctcagtacgggtatctgacgcttaatgatggaagccaggccgtgggtcgttcgtccttttactgcctggaatatttcccgtcgcaaatgctaagaacgggtaacaacttccagttcagctacgagtttgagaacgtacctttccatagcagctacgctcacagccaaagcctggaccgactaatgaatccactcatcgaccaatacttgtactatctctcaaagactattaacggttctggacagaatcaacaaacgctaaaattcagtgtggccggacccagcaacatggctgtccagggaagaaactacatacctggacccagctaccgacaacaacgtgtctcaaccactgtgactcaaaaccttaacagcgaatttgcttggcctggagcttcttcttgggctctcaatggacgtaatagcttgatgaatcctggacctgctatggccagccacaaagaaggagaggaccgtttctttcctttgtctggatctttaatttttggcaaacaaggaactggaagagacaacgtggatgcggacaaagtcatgataaccaacgaagaagaaattaaaactactaacccggtagcaacggagtcctatggacaagtggccacaaaccaccagagtgcccaagcacaggcgcagaccggctgggttcaaaaccaaggaatacttccgggtatggtttggcaggacagagatgtgtacctgcaaggacccatttgggccaaaattcctcacacggacggcaactttcacccttctccgctgatgggagggtttggaatgaagcacccgcctcctcagatcctcatcaaaaacacacctgtacctgcggatcctccaacggccttcaacaaggacaagctgaactctttcatcacccagtattctactggccaagtcagcgtggagatcgagtgggagctgcagaaggaaaacagcaagcgctggaacccggagatccagtacacttccaactattacaagtctaataatgttgaatttgctgttaatactgaaggtgtatatagtgaaccccgccccattggcaccagatacctgactcgtaatctg

SEQ ID NO: 22 - protein, 736 aa, synthetic construct
  REGION 1..736: note = Adeno Associated Virus Capsid Protein Variant
MAADGYLPDWLEDNLSEGIREWWALKPGAPQPKANQQHQDNARGLVLPGYKYLGPGNGLDKGEPVNAADAAALEHDKAYDQQLKAGDNPYLKYNHADAEFQERLKEDTSFGGNLGRAVFQAKKRLLEPLGLVEEAAKTAPGKKRPVEQSPQEPDSSAGIGKSGAQPAKKRLNFGQTGDTESVPDPQPIGEPPAAPSGVGSLTMASGGGAPVADNNEGADGVGSSSGNWHCDSQWLGDRVITTSTRTWALPTYNNHLYKQISNSTSGGSSNDNAYFGYSTPWGYFDFNRFHCHFSPRDWQRLINNNWGFRPKRLNFKLFNIQVKEVTDNNGVKTIANNLTSTVQVFTDSDYQLPYVLGSAHEGCLPPFPADVFMIPQYGYLTLNDGSQAVGRSSFYCLEYFPSQMLRTGNNFQFSYEFENVPFHSSYAHSQSLDRLMNPLIDQYLYYLSKTINGSGQNQQTLKFSVAGPSNMAVQGRNYIPGPSYRQQRVSTTVTQNLNSEFAWPGASSWALNGRNSLMNPGPAMASHKEGEDRFFPLSGSLIFGKQGTGRDNVDADKVMITNEEEIKTTNPVATESYGQVATNHQSAQAQAQTGWVQNQGILPGMVWQDRDVYLQGPIWAKIPHTDGNFHPSPLMGGFGMKHPPPQILIKNTPVPADPPTAFNKDKLNSFITQYSTGQVSVEIEWELQKENSKRWNPEIQYTSNYYKSNNVEFAVNTEGVYSEPRPIGTRYLTRNL

SEQ ID NO: 23 - DNA, 2208 bp, synthetic construct
  misc_feature 1..2208: note = Adeno Associated Virus Capsid Protein Variant
  source 1..2208: mol_type = other DNA
atggctgccgatggttatcttccagattggctcgaggacaaccttagtgaaggaattcgcgagtggtgggctttgaaacctggagcccctcaacccaaggcaaatcaacaacatcaagacaacgctcgaggtcttgtgcttccgggttacaaataccttggacccggcaacggactcgacaagggggagccggtcaacgcagcagacgcggcggccctcgagcacgacaaggcctacgaccagcagctcaaggccggagacaacccgtacctcaagtacaaccacgccgacgccgagttccaggagcggctcaaagaagatacgtcttttgggggcaacctcgggcgagcagtcttccaggccaaaaagaggcttcttgaacctcttggtctggttgaggaagcggctaagacggctcctggaaagaagaggcctgtagagcagtctcctcaggaaccggactcctccgcgggtattggcaaatcgggtgcacagcccgctaaaaagagactcaatttcggtcagactggcgacacagagtcagtcccagaccctcaaccaatcggagaacctcccgcagccccctcaggtgtgggatctcttacaatggcttcaggtggtggcgcaccagtggcagacaataacgaaggtgccgatggagtgggtagttcctcgggaaattggcattgcgattcccaatggctgggggacagagtcatcaccaccagcacccgaacctgggccctgcccacctacaacaatcacctctacaagcaaatctccaacagcacatctggaggatcttcaaatgacaacgcctacttcggctacagcaccccctgggggtattttgacttcaacagattccactgccacttctcaccacgtgactggcagcgactcatcaacaacaactggggattccggcctaagcgactcaacttcaagctcttcaacattcaggtcaaagaggttacggacaacaatggagtcaagaccatcgccaataaccttaccagcacggtccaggtcttcacggactcagactatcagctcccgtacgtgctcgggtcggctcacgagggctgcctcccgccgttcccagcggacgttttcatgattcctcagtacgggtatctgacgcttaatgatggaagccaggccgtgggtcgttcgtccttttactgcctggaatatttcccgtcgcaaatgctaagaacgggtaacaacttccagttcagctacgagtttgagaacgtacctttccatagcagctacgctcacagccaaagcctggaccgactaatgaatccactcatcgaccaatacttgtactatctctcaaagactattaacggttctggacagaatcaacaaacgctaaaattcagtgtggccggacccagcaacatggctgtccagggaagaaactacatacctggacccagctaccgacaacaacgtgtctcaaccactgtgactcaaaacaacaacagcgaatttgcttggccaggagcttcttcttgggctctcaatggacgtaatagcttgatgaatcctggacctgctatggccagccacaaatatggagaggaccgtttctttcctttgtctggatctttaatttttggcaaacaaggaactggaagagacaacgtggatgcggacaaagtcatgataaccaacgaagaagaaattaaaactactaacccggtagcaacggagtcctatggacaagtggccacaaaccaccagagtgcccaagcacaggcgcagaccggctgggttcaaaaccaaggaatacttccgggtatggtttggcaggacagagatgtgtacctgcaaggacccatttgggccaaaattcctcacacggacggcaactttcacccttctccgctgatgggagggtttggaatgaagcacccgcctcctcagatcctcatcaaaaacacacctgtacctgcggatcctccaacggccttcaacaaggacaagctgaactctttcatcacccagtattctactggccaagtcagcgtggagatcgagtgggagctgcagaaggaaaacagcaagcgctggaacccggagatccagtacacttccaactattacaagtctaataatgttgaatttgctgttaatactgaaggtgtatatagtgaaccccgccccattggcaccagatacctgactcgtaatctg

SEQ ID NO: 24 - protein, 736 aa, synthetic construct
  REGION 1..736: note = Adeno Associated Virus Capsid Protein Variant
MAADGYLPDWLEDNLSEGIREWWALKPGAPQPKANQQHQDNARGLVLPGYKYLGPGNGLDKGEPVNAADAAALEHDKAYDQQLKAGDNPYLKYNHADAEFQERLKEDTSFGGNLGRAVFQAKKRLLEPLGLVEEAAKTAPGKKRPVEQSPQEPDSSAGIGKSGAQPAKKRLNFGQTGDTESVPDPQPIGEPPAAPSGVGSLTMASGGGAPVADNNEGADGVGSSSGNWHCDSQWLGDRVITTSTRTWALPTYNNHLYKQISNSTSGGSSNDNAYFGYSTPWGYFDFNRFHCHFSPRDWQRLINNNWGFRPKRLNFKLFNIQVKEVTDNNGVKTIANNLTSTVQVFTDSDYQLPYVLGSAHEGCLPPFPADVFMIPQYGYLTLNDGSQAVGRSSFYCLEYFPSQMLRTGNNFQFSYEFENVPFHSSYAHSQSLDRLMNPLIDQYLYYLSKTINGSGQNQQTLKFSVAGPSNMAVQGRNYIPGPSYRQQRVSTTVTQNNNSEFAWPGASSWALNGRNSLMNPGPAMASHKYGEDRFFPLSGSLIFGKQGTGRDNVDADKVMITNEEEIKTTNPVATESYGQVATNHQSAQAQAQTGWVQNQGILPGMVWQDRDVYLQGPIWAKIPHTDGNFHPSPLMGGFGMKHPPPQILIKNTPVPADPPTAFNKDKLNSFITQYSTGQVSVEIEWELQKENSKRWNPEIQYTSNYYKSNNVEFAVNTEGVYSEPRPIGTRYLTRNL

SEQ ID NO: 25 - DNA, 2208 bp, synthetic construct
  misc_feature 1..2208: note = Adeno Associated Virus Capsid Protein Variant
  source 1..2208: mol_type = other DNA
atggctgccgatggttatcttccagattggctcgaggacaaccttagtgaaggaattcgcgagtggtgggctttgaaacctggagcccctcaacccaaggcaaatcaacaacatcaagacaacgctcgaggtcttgtgcttccgggttacaaataccttggacccggcaacggactcgacaagggggagccggtcaacgcagcagacgcggcggccctcgagcacgacaaggcctacgaccagcagctcaaggccggagacaacccgtacctcaagtacaaccacgccgacgccgagttccaggagcggctcaaagaagatacgtcttttgggggcaacctcgggcgagcagtcttccaggccaaaaagaggcttcttgaacctcttggtctggttgaggaagcggctaagacggctcctggaaagaagaggcctgtagagcagtctcctcaggaaccggactcctccgcgggtattggcaaatcgggtgcacagcccgctaaaaagagactcaatttcggtcagactggcgacacagagtcagtcccagaccctcaaccaatcggagaacctcccgcagccccctcaggtgtgggatctcttacaatggcttcaggtggtggcgcaccagtggcagacaataacgaaggtgccgatggagtgggtagttcctcgggaaattggcattgcgattcccaatggctgggggacagagtcatcaccaccagcacccgaacctgggccctgcccacctacaacaatcacctctacaagcaaatctccaacagcacatctggaggatcttcaaatgacaacgcctacttcggctacagcaccccctgggggtattttgacttcaacagattccactgccacttctcaccacgtgactggcagcgactcatcaacaacaactggggattccggcctaagcgactcaacttcaagctcttcaacattcaggtcaaagaggttacggacaacaatggagtcaagaccatcgccaataaccttaccagcacggtccaggtcttcacggactcagactatcagctcccgtacgtgctcgggtcggctcacgagggctgcctcccgccgttcccagcggacgttttcatgattcctcagtacgggtatctgacgcttaatgatggaagccaggccgtgggtcgttcgtccttttactgcctggaatatttcccgtcgcaaatgctaagaacgggtaacaacttccagttcagctacgagtttgagaacgtacctttccatagcagctacgctcacagccaaagcctggaccgactaatgaatccactcatcgaccaatacttgtactatctctcaaagactattaacggttctggacagaatcaacaaacgctaaaattcagtgtggccggacccagcaacatggctgtccagggaagaaactacatacctggacccagctaccgacaacaacgtgtctcaaccactgtgactcaaaacaacaacagcgaatttgcttggcctggagcttcttcttgggctctcaatggacgtaatagcttgatgaatcctggacctgctatggccagccacaaagaaggagaggaccgtttctttcctttgtctggatctttaatttttggcaaacaaggaactggaagagacaacgtggatgcggacaaagtcatgataaccaacgaagaagaaattaaaactactaacccggtagcaacggagtcctatggacaagtggccacaaaccaccagagtgcccaagcacaggcgcagaccggctgggttcaaaaccaaggaatacttccgggtatggtttggcaggacagagatgtgtacctgcaaggacccatttgggccaaaattcctcacacggacggcaactttcacccttctccgctgatgggagggtttggaatgaagcacccgcctcctcagatcctcatcaaaaacacacctgtacctgcggatcctccaacggccttcaacaaggacaagctgaactctttcatcacccagtattctactggccaagtcagcgtggagatcgagtgggagctgcagaaggaaaacagcaagcgctggaacccggagatccagtacacttccaactggtacaagtctaataatgttgaatttgctgttaatactgaaggtgtatatagtgaaccccgccccattggcaccagatacctgactcgtaatctg

SEQ ID NO: 26 - protein, 736 aa, synthetic construct
  REGION 1..736: note = Adeno Associated Virus Capsid Protein Variant
MAADGYLPDWLEDNLSEGIREWWALKPGAPQPKANQQHQDNARGLVLPGYKYLGPGNGLDKGEPVNAADAAALEHDKAYDQQLKAGDNPYLKYNHADAEFQERLKEDTSFGGNLGRAVFQAKKRLLEPLGLVEEAAKTAPGKKRPVEQSPQEPDSSAGIGKSGAQPAKKRLNFGQTGDTESVPDPQPIGEPPAAPSGVGSLTMASGGGAPVADNNEGADGVGSSSGNWHCDSQWLGDRVITTSTRTWALPTYNNHLYKQISNSTSGGSSNDNAYFGYSTPWGYFDFNRFHCHFSPRDWQRLINNNWGFRPKRLNFKLFNIQVKEVTDNNGVKTIANNLTSTVQVFTDSDYQLPYVLGSAHEGCLPPFPADVFMIPQYGYLTLNDGSQAVGRSSFYCLEYFPSQMLRTGNNFQFSYEFENVPFHSSYAHSQSLDRLMNPLIDQYLYYLSKTINGSGQNQQTLKFSVAGPSNMAVQGRNYIPGPSYRQQRVSTTVTQNNNSEFAWPGASSWALNGRNSLMNPGPAMASHKEGEDRFFPLSGSLIFGKQGTGRDNVDADKVMITNEEEIKTTNPVATESYGQVATNHQSAQAQAQTGWVQNQGILPGMVWQDRDVYLQGPIWAKIPHTDGNFHPSPLMGGFGMKHPPPQILIKNTPVPADPPTAFNKDKLNSFITQYSTGQVSVEIEWELQKENSKRWNPEIQYTSNWYKSNNVEFAVNTEGVYSEPRPIGTRYLTRNL

SEQ ID NO: 27 - DNA, 2208 bp, synthetic construct
  misc_feature 1..2208: note = Adeno Associated Virus Capsid Protein Variant
  source 1..2208: mol_type = other DNA
atggctgccgatggttatcttccagattggctcgaggacaaccttagtgaaggaattcgcgagtggtgggctttgaaacctggagcccctcaacccaaggcaaatcaacaacatcaagacaacgctcgaggtcttgtgcttccgggttacaaataccttggacccggcaacggactcgacaagggggagccggtcaacgcagcagacgcggcggccctcgagcacgacaaggcctacgaccagcagctcaaggccggagacaacccgtacctcaagtacaaccacgccgacgccgagttccaggagcggctcaaagaagatacgtcttttgggggcaacctcgggcgagcagtcttccaggccaaaaagaggcttcttgaacctcttggtctggttgaggaagcggctaagacggctcctggaaagaagaggcctgtagagcagtctcctcaggaaccggactcctccgcgggtattggcaaatcgggtgcacagcccgctaaaaagagactcaatttcggtcagactggcgacacagagtcagtcccagaccctcaaccaatcggagaacctcccgcagccccctcaggtgtgggatctcttacaatggcttcaggtggtggcgcaccagtggcagacaataacgaaggtgccgatggagtgggtagttcctcgggaaattggcattgcgattcccaatggctgggggacagagtcatcaccaccagcacccgaacctgggccctgcccacctacaacaatcacctctacaagcaaatctccaacagcacatctggaggatcttcaaatgacaacgcctacttcggctacagcaccccctgggggtattttgacttcaacagattccactgccacttctcaccacgtgactggcagcgactcatcaacaacaactggggattccggcctaagcgactcaacttcaagctcttcaacattcaggtcaaagaggttacggacaacaatggagtcaagaccatcgccaataaccttaccagcacggtccaggtcttcacggactcagactatcagctcccgtacgtgctcgggtcggctcacgagggctgcctcccgccgttcccagcggacgttttcatgattcctcagtacgggtatctgacgcttaatgatggaagccaggccgtgggtcgttcgtccttttactgcctggaatatttcccgtcgcaaatgctaagaacgggtaacaacttccagttcagctacgagtttgagaacgtacctttccatagcagctacgctcacagccaaagcctggaccgactaatgaatccactcatcgaccaatacttgtactatctctcaaagactattaacggttctggacagaatcaacaaacgctaaaattcagtgtggccggacccagcaacatggctgtccagggaagaaactacatacctggacccagctaccgacaacaacgtgtctcaaccactgtgactcaaaacaacaacagcgaatttgcttggcctggagcttcttcttgggctctcaatggacgtaatagcttgatgaatcctggacctgctatggccagccacaaagaaggagaggaccgtttctttcctttgtctggatctttaatttttggcaaacaaggaactggaagagacaacgtggtggcggacaaagtcatgataaccaacgaagaagaaattaaaactactaacccggtagcaacggagtcctatggacaagtggccacaaaccaccagagtgcccaagcacaggcgcagaccggctgggttcaaaaccaaggaatacttccgggtatggtttggcaggacagagatgtgtacctgcaaggacccatttgggccaaaattcctcacacggacggcaactttcacccttctccgctgatgggagggtttggaatgaagcacccgcctcctcagatcctcatcaaaaacacacctgtacctgcggatcctccaacggccttcaacaaggacaagctgaactctttcatcacccagtattctactggccaagtcagcgtggagatcgagtgggagctgcagaaggaaaacagcaagcgctggaacccggagatccagtacacttccaactattacaagtctaataatgttgaatttgctgttaatactgaaggtgtatatagtgaaccccgccccattggcaccagatacctgactcgtaatctg

SEQ ID NO: 28 - protein, 736 aa, synthetic construct
  REGION 1..736: note = Adeno Associated Virus Capsid Protein Variant
MAADGYLPDWLEDNLSEGIREWWALKPGAPQPKANQQHQDNARGLVLPGYKYLGPGNGLDKGEPVNAADAAALEHDKAYDQQLKAGDNPYLKYNHADAEFQERLKEDTSFGGNLGRAVFQAKKRLLEPLGLVEEAAKTAPGKKRPVEQSPQEPDSSAGIGKSGAQPAKKRLNFGQTGDTESVPDPQPIGEPPAAPSGVGSLTMASGGGAPVADNNEGADGVGSSSGNWHCDSQWLGDRVITTSTRTWALPTYNNHLYKQISNSTSGGSSNDNAYFGYSTPWGYFDFNRFHCHFSPRDWQRLINNNWGFRPKRLNFKLFNIQVKEVTDNNGVKTIANNLTSTVQVFTDSDYQLPYVLGSAHEGCLPPFPADVFMIPQYGYLTLNDGSQAVGRSSFYCLEYFPSQMLRTGNNFQFSYEFENVPFHSSYAHSQSLDRLMNPLIDQYLYYLSKTINGSGQNQQTLKFSVAGPSNMAVQGRNYIPGPSYRQQRVSTTVTQNNNSEFAWPGASSWALNGRNSLMNPGPAMASHKEGEDRFFPLSGSLIFGKQGTGRDNVVADKVMITNEEEIKTTNPVATESYGQVATNHQSAQAQAQTGWVQNQGILPGMVWQDRDVYLQGPIWAKIPHTDGNFHPSPLMGGFGMKHPPPQILIKNTPVPADPPTAFNKDKLNSFITQYSTGQVSVEIEWELQKENSKRWNPEIQYTSNYYKSNNVEFAVNTEGVYSEPRPIGTRYLTRNL

SEQ ID NO: 29 - DNA, 2208 bp, synthetic construct
  misc_feature 1..2208: note = Adeno Associated Virus Capsid Protein Variant
  source 1..2208: mol_type = other DNA
atggctgccgatggttatcttccagattggctcgaggacaaccttagtgaaggaattcgcgagtggtgggctttgaaacctggagcccctcaacccaaggcaaatcaacaacatcaagacaacgctcgaggtcttgtgcttccgggttacaaataccttggacccggcaacggactcgacaagggggagccggtcaacgcagcagacgcggcggccctcgagcacgacaaggcctacgaccagcagctcaaggccggagacaacccgtacctcaagtacaaccacgccgacgccgagttccaggagcggctcaaagaagatacgtcttttgggggcaacctcgggcgagcagtcttccaggccaaaaagaggcttcttgaacctcttggtctggttgaggaagcggctaagacggctcctggaaagaagaggcctgtagagcagtctcctcaggaaccggactcctccgcgggtattggcaaatcgggtgcacagcccgctaaaaagagactcaatttcggtcagactggcgacacagagtcagtcccagaccctcaaccaatcggagaacctcccgcagccccctcaggtgtgggatctcttacaatggcttcaggtggtggcgcaccagtggcagacaataacgaaggtgccgatggagtgggtagttcctcgggaaattggcattgcgattcccaatggctgggggacagagtcatcaccaccagcacccgaacctgggccctgcccacctacaacaatcacctctacaagcaaatctccaacagcacatctggaggatcttcaaatgacaacgcctacttcggctacagcaccccctgggggtattttgacttcaacagattccactgccacttctcaccacgtgactggcagcgactcatcaacaacaactggggattccggcctaagcgactcaacttcaagctcttcaacattcaggtcaaagaggttacggacaacaatggagtcaagaccatcgccaataaccttaccagcacggtccaggtcttcacggactcagactatcagctcccgtacgtgctcgggtcggctcacgagggctgcctcccgccgttcccagcggacgttttcatgattcctcagtacgggtatctgacgcttaatgatggaagccaggccgtgggtcgttcgtccttttactgcctggaatatttcccgtcgcaaatgctaagaacgggtaacaacttccagttcagctacgagtttgagaacgtacctttccatagcagctacgctcacagccaaagcctggaccgactaatgaatccactcatcgaccaatacttgtactatctctcaaagactattaacggttctggacagaatcaacaaacgctaaaattcagtgtggccggacccagcaacatggctgtccagggaagaaactacatacctggacccagctaccgacaacaacgtgtctcaaccactgtgactcaaaacaacaacagcgattttgcttggcctggagcttcttcttgggctctcaatggacgtaatagcttgatgaatcctggacctgctatggccagccacaaagaaggagaggaccgtttctttcctttgtctggatctttaatttttggcaaacaaggaactggaagagacaacgtggatgcggacaaagtcatgataaccaacgaagaagaaattaaaactactaacccggtagcaacggagtcctatggacaagtggccacaaaccaccagagtgcccaagcacaggcgcagaccggctgggttcaaaaccaaggaatacttccgggtatggtttggcaggacagagatgtgtacctgcaaggacccatttgggccaaaattcctcacacggacggcaactttcacccttctccgctgatgggagggtttggaatgaagcacccgcctcctcagatcctcatcaaaaacacacctgtacctgcggatcctccaacggccttcaacaaggacaagctgaactctttcatcacccagtattctactggccaagtcagcgtggagatcgagtgggagctgcagaaggaaaacagcaagcgctggaacccggagatccagtacacttccaactattacaagtctaataatgttgaatttgctgttaatactgaaggtgtatatagtgaaccccgccccattggcaccagatacctgactcgtaatctg

SEQ ID NO: 30 - protein, 736 aa, synthetic construct
  REGION 1..736: note = Adeno Associated Virus Capsid Protein Variant
MAADGYLPDWLEDNLSEGIREWWALKPGAPQPKANQQHQDNARGLVLPGYKYLGPGNGLDKGEPVNAADAAALEHDKAYDQQLKAGDNPYLKYNHADAEFQERLKEDTSFGGNLGRAVFQAKKRLLEPLGLVEEAAKTAPGKKRPVEQSPQEPDSSAGIGKSGAQPAKKRLNFGQTGDTESVPDPQPIGEPPAAPSGVGSLTMASGGGAPVADNNEGADGVGSSSGNWHCDSQWLGDRVITTSTRTWALPTYNNHLYKQISNSTSGGSSNDNAYFGYSTPWGYFDFNRFHCHFSPRDWQRLINNNWGFRPKRLNFKLFNIQVKEVTDNNGVKTIANNLTSTVQVFTDSDYQLPYVLGSAHEGCLPPFPADVFMIPQYGYLTLNDGSQAVGRSSFYCLEYFPSQMLRTGNNFQFSYEFENVPFHSSYAHSQSLDRLMNPLIDQYLYYLSKTINGSGQNQQTLKFSVAGPSNMAVQGRNYIPGPSYRQQRVSTTVTQNNNSDFAWPGASSWALNGRNSLMNPGPAMASHKEGEDRFFPLSGSLIFGKQGTGRDNVDADKVMITNEEEIKTTNPVATESYGQVATNHQSAQAQAQTGWVQNQGILPGMVWQDRDVYLQGPIWAKIPHTDGNFHPSPLMGGFGMKHPPPQILIKNTPVPADPPTAFNKDKLNSFITQYSTGQVSVEIEWELQKENSKRWNPEIQYTSNYYKSNNVEFAVNTEGVYSEPRPIGTRYLTRNL

SEQ ID NO: 31 - DNA, 2208 bp, synthetic construct
  misc_feature 1..2208: note = Adeno Associated Virus Capsid Protein Variant
  source 1..2208: mol_type = other DNA
atggctgccgatggttatcttccagattggctcgaggacaaccttagtgaaggaattcgcgagtggtgggctttgaaacctggagcccctcaacccaaggcaaatcaacaacatcaagacaacgctcgaggtcttgtgcttccgggttacaaataccttggacccggcaacggactcgacaagggggagccggtcaacgcagcagacgcggcggccctcgagcacgacaaggcctacgaccagcagctcaaggccggagacaacccgtacctcaagtacaaccacgccgacgccgagttccaggagcggctcaaagaagatacgtcttttgggggcaacctcgggcgagcagtcttccaggccaaaaagaggcttcttgaacctcttggtctggttgaggaagcggctaagacggctcctggaaagaagaggcctgtagagcagtctcctcaggaaccggactcctccgcgggtattggcaaatcgggtgcacagcccgctaaaaagagactcaatttcggtcagactggcgacacagagtcagtcccagaccctcaaccaatcggagaacctcccgcagccccctcaggtgtgggatctcttacaatggcttcaggtggtggcgcaccagtggcagacaataacgaaggtgccgatggagtgggtagttcctcgggaaattggcattgcgattcccaatggctgggggacagagtcatcaccaccagcacccgaacctgggccctgcccacctacaacaatcacctctacaagcaaatctccaacagcacatctggaggatcttcaaatgacaacgcctacttcggctacagcaccccctgggggtattttgacttcaacagattccactgccacttctcaccacgtgactggcagcgactcatcaacaacaactggggattccggcctaagcgactcaacttcaagctcttcaacattcaggtcaaagaggttacggacaacaatggagtcaagaccatcgccaataaccttaccagcacggtccaggtcttcacggactcagactatcagctcccgtacgtgctcgggtcggctcacgagggctgcctcccgccgttcccagcggacgttttcatgattcctcagtacgggtatctgacgcttaatgatggaagccaggccgtgggtcgttcgtccttttactgcctggaatatttcccgtcgcaaatgctaagaacgggtaacaacttccagttcagctacgagtttgagaacgtacctttccatagcagctacgctcacagccaaagcctggaccgactaatgaatccactcatcgaccaatacttgtactatctctcaaagactattaacggttctggacagaatcaacaaacgctaaaattcagtgtggccggacccagcaacatggctgtccagggaagaaactacatacctggacccagctaccgacaacaacgtgtctcaaccactgtgactcaaaacaacaacagcgaatttgcttggcctggagcttcttcttgggctctcaatggacgtaatagcttgatgaatcctggacctgctatggccagccacaaagaaggagaggaccgtttctttcctttgtctggatctttaatttttggcaaacaaggactgggaagagacaacgtggatgcggacaaagtcatgataaccaacgaagaagaaattaaaactactaacccggtagcaacggagtcctatggacaagtggccacaaaccaccagagtgcccaagcacaggcgcagaccggctgggttcaaaaccaaggaatacttccgggtatggtttggcaggacagagatgtgtacctgcaaggacccatttgggccaaaattcctcacacggacggcaactttcacccttctccgctgatgggagggtttggaatgaagcacccgcctcctcagatcctcatcaaaaacacacctgtacctgcggatcctccaacggccttcaacaaggacaagctgaactctttcatcacccagtattctactggccaagtcagcgtggagatcgagtgggagctgcagaaggaaaacagcaagcgctggaacccggagatccagtacacttccaactattacaagtctaataatgttgaatttgctgttaatactgaaggtgtatatagtgaaccccgccccattggcaccagatacctgactcgtaatctg

SEQ ID NO: 32 - protein, 736 aa, synthetic construct
  REGION 1..736: note = Adeno Associated Virus Capsid Protein Variant
MAADGYLPDWLEDNLSEGIREWWALKPGAPQPKANQQHQDNARGLVLPGYKYLGPGNGLDKGEPVNAADAAALEHDKAYDQQLKAGDNPYLKYNHADAEFQERLKEDTSFGGNLGRAVFQAKKRLLEPLGLVEEAAKTAPGKKRPVEQSPQEPDSSAGIGKSGAQPAKKRLNFGQTGDTESVPDPQPIGEPPAAPSGVGSLTMASGGGAPVADNNEGADGVGSSSGNWHCDSQWLGDRVITTSTRTWALPTYNNHLYKQISNSTSGGSSNDNAYFGYSTPWGYFDFNRFHCHFSPRDWQRLINNNWGFRPKRLNFKLFNIQVKEVTDNNGVKTIANNLTSTVQVFTDSDYQLPYVLGSAHEGCLPPFPADVFMIPQYGYLTLNDGSQAVGRSSFYCLEYFPSQMLRTGNNFQFSYEFENVPFHSSYAHSQSLDRLMNPLIDQYLYYLSKTINGSGQNQQTLKFSVAGPSNMAVQGRNYIPGPSYRQQRVSTTVTQNNNSEFAWPGASSWALNGRNSLMNPGPAMASHKEGEDRFFPLSGSLIFGKQGLGRDNVDADKVMITNEEEIKTTNPVATESYGQVATNHQSAQAQAQTGWVQNQGILPGMVWQDRDVYLQGPIWAKIPHTDGNFHPSPLMGGFGMKHPPPQILIKNTPVPADPPTAFNKDKLNSFITQYSTGQVSVEIEWELQKENSKRWNPEIQYTSNYYKSNNVEFAVNTEGVYSEPRPIGTRYLTRNL

SEQ ID NO: 33 - DNA, 2208 bp, synthetic construct
  misc_feature 1..2208: note = Adeno Associated Virus Capsid Protein Variant
  source 1..2208: mol_type = other DNA
atggctgccgatggttatcttccagattggctcgaggacaaccttagtgaaggaattcgcgagtggtgggctttgaaacctggagcccctcaacccaaggcaaatcaacaacatcaagacaacgctcgaggtcttgtgcttccgggttacaaataccttggacccggcaacggactcgacaagggggagccggtcaacgcagcagacgcggcggccctcgagcacgacaaggcctacgaccagcagctcaaggccggagacaacccgtacctcaagtacaaccacgccgacgccgagttccaggagcggctcaaagaagatacgtcttttgggggcaacctcgggcgagcagtcttccaggccaaaaagaggcttcttgaacctcttggtctggttgaggaagcggctaagacggctcctggaaagaagaggcctgtagagcagtctcctcaggaaccggactcctccgcgggtattggcaaatcgggtgcacagcccgctaaaaagagactcaatttcggtcagactggcgacacagagtcagtcccagaccctcaaccaatcggagaacctcccgcagccccctcaggtgtgggatctcttacaatggcttcaggtggtggcgcaccagtggcagacaataacgaaggtgccgatggagtgggtagttcctcgggaaattggcattgcgattcccaatggctgggggacagagtcatcaccaccagcacccgaacctgggccctgcccacctacaacaatcacctctacaagcaaatctccaacagcacatctggaggatcttcaaatgacaacgcctacttcggctacagcaccccctgggggtattttgacttcaacagattccactgccacttctcaccacgtgactggcagcgactcatcaacaacaactggggattccggcctaagcgactcaacttcaagctcttcaacattcaggtcaaagaggttacggacaacaatggagtcaagaccatcgccaataaccttaccagcacggtccaggtcttcacggactcagactatcagctcccgtacgtgctcgggtcggctcacgagggctgcctcccgccgttcccagcggacgttttcatgattcctcagtacgggtatctgacgcttaatgatggaagccaggccgtgggtcgttcgtccttttactgcctggaatatttcccgtcgcaaatgctaagaacgggtaacaacttccagttcagctacgagtttgagaacgtacctttccatagcagctacgctcacagccaaagcctggaccgactaatgaatccactcatcgaccaatacttgtactatctctcaaagactattaacggttctggacagaatcaacaaacgctaaaattcagtgtggccggacccagcaacatggctgtccagggaagaaactacatacctggacccagctaccgacaacaacgtgtctcaaccactgtgactcaaaacaacaacagcgaatttgcttggcctggagcttcttcttgggctctcaatggacgtaatagcttgatgaatcctggacctgctatggccagccacaaagaaggagaggaccgtttctttcctttgtctggatctttaatttttggcaaacaaggaactggaagagacaacgtggatgcggacaaagtcatgataaccaacgaagaagaaattaaaactactaacccggtagcaacggagtcctatggacaagtggccgggaaccaccagagtgcccaagcacaggcgcagaccggctgggttcaaaaccaaggaatacttccgggtatggtttggcaggacagagatgtgtacctgcaaggacccatttgggccaaaattcctcacacggacggcaactttcacccttctccgctgatgggagggtttggaatgaagcacccgcctcctcagatcctcatcaaaaacacacctgtacctgcggatcctccaacggccttcaacaaggacaagctgaactctttcatcacccagtattctactggccaagtcagcgtggagatcgagtgggagctgcagaaggaaaacagcaagcgctggaacccggagatccagtacacttccaactattacaagtctaataatgttgaatttgctgttaatactgaaggtgtatatagtgaaccccgccccattggcaccagatacctgactcgtaatctg

SEQ ID NO: 34 - protein, 736 aa, synthetic construct
  REGION 1..736: note = Adeno Associated Virus Capsid Protein Variant
MAADGYLPDWLEDNLSEGIREWWALKPGAPQPKANQQHQDNARGLVLPGYKYLGPGNGLDKGEPVNAADAAALEHDKAYDQQLKAGDNPYLKYNHADAEFQERLKEDTSFGGNLGRAVFQAKKRLLEPLGLVEEAAKTAPGKKRPVEQSPQEPDSSAGIGKSGAQPAKKRLNFGQTGDTESVPDPQPIGEPPAAPSGVGSLTMASGGGAPVADNNEGADGVGSSSGNWHCDSQWLGDRVITTSTRTWALPTYNNHLYKQISNSTSGGSSNDNAYFGYSTPWGYFDFNRFHCHFSPRDWQRLINNNWGFRPKRLNFKLFNIQVKEVTDNNGVKTIANNLTSTVQVFTDSDYQLPYVLGSAHEGCLPPFPADVFMIPQYGYLTLNDGSQAVGRSSFYCLEYFPSQMLRTGNNFQFSYEFENVPFHSSYAHSQSLDRLMNPLIDQYLYYLSKTINGSGQNQQTLKFSVAGPSNMAVQGRNYIPGPSYRQQRVSTTVTQNNNSEFAWPGASSWALNGRNSLMNPGPAMASHKEGEDRFFPLSGSLIFGKQGTGRDNVDADKVMITNEEEIKTTNPVATESYGQVAGNHQSAQAQAQTGWVQNQGILPGMVWQDRDVYLQGPIWAKIPHTDGNFHPSPLMGGFGMKHPPPQILIKNTPVPADPPTAFNKDKLNSFITQYSTGQVSVEIEWELQKENSKRWNPEIQYTSNYYKSNNVEFAVNTEGVYSEPRPIGTRYLTRNL

SEQ ID NO: 35 - DNA, 2208 bp, synthetic construct
  misc_feature 1..2208: note = Adeno Associated Virus Capsid Protein Variant
  source 1..2208: mol_type = other DNA
atggctgccgatggttatcttccagattggctcgaggacaaccttagtgaaggaattcgcgagtggtgggctttgaaacctggagcccctcaacccaaggcaaatcaacaacatcaagacaacgctcgaggtcttgtgcttccgggttacaaataccttggacccggcaacggactcgacaagggggagccggtcaacgcagcagacgcggcggccctcgagcacgacaaggcctacgaccagcagctcaaggccggagacaacccgtacctcaagtacaaccacgccgacgccgagttccaggagcggctcaaagaagatacgtcttttgggggcaacctcgggcgagcagtcttccaggccaaaaagaggcttcttgaacctcttggtctggttgaggaagcggctaagacggctcctggaaagaagaggcctgtagagcagtctcctcaggaaccggactcctccgcgggtattggcaaatcgggtgcacagcccgctaaaaagagactcaatttcggtcagactggcgacacagagtcagtcccagaccctcaaccaatcggagaacctcccgcagccccctcaggtgtgggatctcttacaatggcttcaggtggtggcgcaccagtggcagacaataacgaaggtgccgatggagtgggtagttcctcgggaaattggcattgcgattcccaatggctgggggacagagtcatcaccaccagcacccgaacctgggccctgcccacctacaacaatcacctctacaagcaaatctccaacagcacatctggaggatcttcaaatgacaacgcctacttcggctacagcaccccctgggggtattttgacttcaacagattccactgccacttctcaccacgtgactggcagcgactcatcaacaacaactggggattccggcctaagcgactcaacttcaagctcttcaacattcaggtcaaagaggttacggacaacaatggagtcaagaccatcgccaataaccttaccagcacggtccaggtcttcacggactcagactatcagctcccgtacgtgctcgggtcggctcacgagggctgcctcccgccgttcccagcggacgttttcatgattcctcagtacgggtatctgacgcttaatgatggaagccaggccgtgggtcgttcgtccttttactgcctggaatatttcccgtcgcaaatgctaagaacgggtaacaacttccagttcagctacgagtttgagaacgtacctttccatagcagctacgctcacagccaaagcctggaccgactaatgaatccactcatcgaccaatacttgtactatctctcaaagactattaacggttctggacagaatcaacaaacgctaaaattcagtgtggccggacccagcaacatggctgtccagggaagaaactacatacctggacccagctaccgacaacaacgtgtctcaaccactgtgactcaaaacaacaacagcgaatttgcttggcctggagcttcttcttgggctctcaatggacgtaatagcttgatgaatcctggacctgctatggccagccacaaagaaggagaggaccgtttctttcctttgtctggatctttaatttttggcaaacaaggaactggaagagacaacgtggatgcggacaaagtcatgataaccaacgaagaagaaattaaaactactaacccggtagcaacggagtcctatggacaagtggccacaaaccaccagtgggcccaagcacaggcgcagaccggctgggttcaaaaccaaggaatacttccgggtatggtttggcaggacagagatgtgtacctgcaaggacccatttgggccaaaattcctcacacggacggcaactttcacccttctccgctgatgggagggtttggaatgaagcacccgcctcctcagatcctcatcaaaaacacacctgtacctgcggatcctccaacggccttcaacaaggacaagctgaactctttcatcacccagtattctactggccaagtcagcgtggagatcgagtgggagctgcagaaggaaaacagcaagcgctggaacccggagatccagtacacttccaactattacaagtctaataatgttgaatttgctgttaatactgaaggtgtatatagtgaaccccgccccattggcaccagatacctgactcgtaatctg

SEQ ID NO: 36 - protein, 736 aa, synthetic construct
  REGION 1..736: note = Adeno Associated Virus Capsid Protein Variant
MAADGYLPDWLEDNLSEGIREWWALKPGAPQPKANQQHQDNARGLVLPGYKYLGPGNGLDKGEPVNAADAAALEHDKAYDQQLKAGDNPYLKYNHADAEFQERLKEDTSFGGNLGRAVFQAKKRLLEPLGLVEEAAKTAPGKKRPVEQSPQEPDSSAGIGKSGAQPAKKRLNFGQTGDTESVPDPQPIGEPPAAPSGVGSLTMASGGGAPVADNNEGADGVGSSSGNWHCDSQWLGDRVITTSTRTWALPTYNNHLYKQISNSTSGGSSNDNAYFGYSTPWGYFDFNRFHCHFSPRDWQRLINNNWGFRPKRLNFKLFNIQVKEVTDNNGVKTIANNLTSTVQVFTDSDYQLPYVLGSAHEGCLPPFPADVFMIPQYGYLTLNDGSQAVGRSSFYCLEYFPSQMLRTGNNFQFSYEFENVPFHSSYAHSQSLDRLMNPLIDQYLYYLSKTINGSGQNQQTLKFSVAGPSNMAVQGRNYIPGPSYRQQRVSTTVTQNNNSEFAWPGASSWALNGRNSLMNPGPAMASHKEGEDRFFPLSGSLIFGKQGTGRDNVDADKVMITNEEEIKTTNPVATESYGQVATNHQWAQAQAQTGWVQNQGILPGMVWQDRDVYLQGPIWAKIPHTDGNFHPSPLMGGFGMKHPPPQILIKNTPVPADPPTAFNKDKLNSFITQYSTGQVSVEIEWELQKENSKRWNPEIQYTSNYYKSNNVEFAVNTEGVYSEPRPIGTRYLTRNL

SEQ ID NO: 37 - DNA, 2208 bp, synthetic construct
  misc_feature 1..2208: note = Adeno Associated Virus Capsid Protein Variant
  source 1..2208: mol_type = other DNA
atggctgccgatggttatcttccagattggctcgaggacaaccttagtgaaggaattcgcgagtggtgggctttgaaacctggagcccctcaacccaaggcaaatcaacaacatcaagacaacgctcgaggtcttgtgcttccgggttacaaataccttggacccggcaacggactcgacaagggggagccggtcaacgcagcagacgcggcggccctcgagcacgacaaggcctacgaccagcagctcaaggccggagacaacccgtacctcaagtacaaccacgccgacgccgagttccaggagcggctcaaagaagatacgtcttttgggggcaacctcgggcgagcagtcttccaggccaaaaagaggcttcttgaacctcttggtctggttgaggaagcggctaagacggctcctggaaagaagaggcctgtagagcagtctcctcaggaaccggactcctccgcgggtattggcaaatcgggtgcacagcccgctaaaaagagactcaatttcggtcagactggcgacacagagtcagtcccagaccctcaaccaatcggagaacctcccgcagccccctcaggtgtgggatctcttacaatggcttcaggtggtggcgcaccagtggcagacaataacgaaggtgccgatggagtgggtagttcctcgggaaattggcattgcgattcccaatggctgggggacagagtcatcaccaccagcacccgaacctgggccctgcccacctacaacaatcacctctacaagcaaatctccaacagcacatctggaggatcttcaaatgacaacgcctacttcggctacagcaccccctgggggtattttgacttcaacagattccactgccacttctcaccacgtgactggcagcgactcatcaacaacaactggggattccggcctaagcgactcaacttcaagctcttcaacattcaggtcaaagaggttacggacaacaatggagtcaagaccatcgccaataaccttaccagcacggtccaggtcttcacggactcagactatcagctcccgtacgtgctcgggtcggctcacgagggctgcctcccgccgttcccagcggacgttttcatgattcctcagtacgggtatctgacgcttaatgatggaagccaggccgtgggtcgttcgtccttttactgcctggaatatttcccgtcgcaaatgctaagaacgggtaacaacttccagttcagctacgagtttgagaacgtacctttccatagcagctacgctcacagccaaagcctggaccgactaatgaatccactcatcgaccaatacttgtactatctctcaaagactattaacttgtctggacagaatcaacaaacgctaaaattcagtgtggccggacccagcaacatggctgtccagggaagaaactacatacctggacccagctaccgacaacaacgtgtctcaaccactgtgactcaaaacaacaacagcgaatttgcttggcctggagcttcttcttgggctctcaatggacgtaatagcttgatgaatcctggacctgctatggccagccacaaagaaggagaggaccgtttctttcctttgtctggatctttaatttttggcaaacaaggaactggaagagacaacgtggatgcggacaaagtcatgataaccaacgaagaagaaattaaaactactaacccggtagcaacggagtcctatggacaagtggccacaaaccaccagagtgcccaagcacaggcgcagaccggctgggttcaaaaccaaggaatacttccgggtatggtttggcaggacagagatgtgtacctgcaaggacccatttgggccaaaattcctcacacggacggcaactttcacccttctccgctgatgggagggtttggaatgaagcacccgcctcctcagatcctcatcaaaaacacacctgtacctgcggatcctccaacggccttcaacaaggacaagctgaactctttcatcacccagtattctactggccaagtcagcgtggagatcgagtgggagctgcagaaggaaaacagcaagcgctggaacccggagatccagtacacttccaactattacaagtctaataatgttgaatttgctgttaatactgaaggtgtatatagtgaaccccgccccattggcaccagatacctgactcgtaatctg

SEQ ID NO: 38 - protein, 736 aa, synthetic construct
  REGION 1..736: note = Adeno Associated Virus Capsid Protein Variant
MAADGYLPDWLEDNLSEGIREWWALKPGAPQPKANQQHQDNARGLVLPGYKYLGPGNGLDKGEPVNAADAAALEHDKAYDQQLKAGDNPYLKYNHADAEFQERLKEDTSFGGNLGRAVFQAKKRLLEPLGLVEEAAKTAPGKKRPVEQSPQEPDSSAGIGKSGAQPAKKRLNFGQTGDTESVPDPQPIGEPPAAPSGVGSLTMASGGGAPVADNNEGADGVGSSSGNWHCDSQWLGDRVITTSTRTWALPTYNNHLYKQISNSTSGGSSNDNAYFGYSTPWGYFDFNRFHCHFSPRDWQRLINNNWGFRPKRLNFKLFNIQVKEVTDNNGVKTIANNLTSTVQVFTDSDYQLPYVLGSAHEGCLPPFPADVFMIPQYGYLTLNDGSQAVGRSSFYCLEYFPSQMLRTGNNFQFSYEFENVPFHSSYAHSQSLDRLMNPLIDQYLYYLSKTINLSGQNQQTLKFSVAGPSNMAVQGRNYIPGPSYRQQRVSTTVTQNNNSEFAWPGASSWALNGRNSLMNPGPAMASHKEGEDRFFPLSGSLIFGKQGTGRDNVDADKVMITNEEEIKTTNPVATESYGQVATNHQSAQAQAQTGWVQNQGILPGMVWQDRDVYLQGPIWAKIPHTDGNFHPSPLMGGFGMKHPPPQILIKNTPVPADPPTAFNKDKLNSFITQYSTGQVSVEIEWELQKENSKRWNPEIQYTSNYYKSNNVEFAVNTEGVYSEPRPIGTRYLTRNL

SEQ ID NO: 39 - DNA, 2208 bp, synthetic construct
  misc_feature 1..2208: note = Adeno Associated Virus Capsid Protein Variant
  source 1..2208: mol_type = other DNA
atggctgccgatggttatcttccagattggctcgaggacaaccttagtgaaggaattcgcgagtggtgggctttgaaacctggagcccctcaacccaaggcaaatcaacaacatcaagacaacgctcgaggtcttgtgcttccgggttacaaataccttggacccggcaacggactcgacaagggggagccggtcaacgcagcagacgcggcggccctcgagcacgacaaggcctacgaccagcagctcaaggccggagacaacccgtacctcaagtacaaccacgccgacgccgagttccaggagcggctcaaagaagatacgtcttttgggggcaacctcgggcgagcagtcttccaggccaaaaagaggcttcttgaacctcttggtctggttgaggaagcggctaagacggctcctggaaagaagaggcctgtagagcagtctcctcaggaaccggactcctccgcgggtattggcaaatcgggtgcacagcccgctaaaaagagactcaatttcggtcagactggcgacacagagtcagtcccagaccctcaaccaatcggagaacctcccgcagccccctcaggtgtgggatctcttacaatggcttcaggtggtggcgcaccagtggcagacaataacgaaggtgccgatggagtgggtagttcctcgggaaattggcattgcgattcccaatggctgggggacagagtcatcaccaccagcacccgaacctgggccctgcccacctacaacaatcacctctacaagcaaatctccaacagcacatctggaggatcttcaaatgacaacgcctacttcggctacagcaccccctgggggtattttgacttcaacagattccactgccacttctcaccacgtgactggcagcgactcatcaacaacaactggggattccggcctaagcgactcaacttcaagctcttcaacattcaggtcaaagaggttacggacaacaatggagtcaagaccatcgccaataaccttaccagcacggtccaggtcttcacggactcagactatcagctcccgtacgtgctcgggtcggctcacgagggctgcctcccgccgttcccagcggacgttttcatgattcctcagtacgggtatctgacgcttaatgatggaagccaggccgtgggtcgttcgtccttttactgcctggaatatttcccgtcgcaaatgctaagaacgggtaacaacttccagttcagctacgagtttgagaacgtacctttccatagcagctacgctcacagccaaagcctggaccgactaatgaatccactcatcgaccaatacttgtactatctctcaaagactattaacggttctggacagaatcaacaaacgctaaaattcagtgtggccggacccagcaacatggctgtccagggaagaaactacatacctggacccagctaccgacaacaacgtgtctcaaccactgtgactcaaaacaacaacagcgaatttgcttggcctggagcttcttcttgggctctcaatggacgtaatagcttgatgaatcctggacctgctatggccagccacaaagaaggagaggaccgtttctttcctttgtctggatctttaatttttggcaaacaaggaactggaagagacaacgtggatgcggacaaagtcatgataaccaacgaagaagaaattaaaactactaacccggtagcaacggagtcctatggacaagtggccacaaactgtcagagtgcccaagcacaggcgcagaccggctgggttcaaaaccaaggaatacttccgggtatggtttggcaggacagagatgtgtacctgcaaggacccatttgggccaaaattcctcacacggacggcaactttcacccttctccgctgatgggagggtttggaatgaagcacccgcctcctcagatcctcatcaaaaacacacctgtacctgcggatcctccaacggccttcaacaaggacaagctgaactctttcatcacccagtattctactggccaagtcagcgtggagatcgagtgggagctgcagaaggaaaacagcaagcgctggaacccggagatccagtacacttccaactattacaagtctaataatgttgaatttgctgttaatactgaaggtgtatatagtgaaccccgccccattggcaccagatacctgactcgtaatctg

SEQ ID NO: 40 - protein, 736 aa, synthetic construct
  REGION 1..736: note = Adeno Associated Virus Capsid Protein Variant
MAADGYLPDWLEDNLSEGIREWWALKPGAPQPKANQQHQDNARGLVLPGYKYLGPGNGLDKGEPVNAADAAALEHDKAYDQQLKAGDNPYLKYNHADAEFQERLKEDTSFGGNLGRAVFQAKKRLLEPLGLVEEAAKTAPGKKRPVEQSPQEPDSSAGIGKSGAQPAKKRLNFGQTGDTESVPDPQPIGEPPAAPSGVGSLTMASGGGAPVADNNEGADGVGSSSGNWHCDSQWLGDRVITTSTRTWALPTYNNHLYKQISNSTSGGSSNDNAYFGYSTPWGYFDFNRFHCHFSPRDWQRLINNNWGFRPKRLNFKLFNIQVKEVTDNNGVKTIANNLTSTVQVFTDSDYQLPYVLGSAHEGCLPPFPADVFMIPQYGYLTLNDGSQAVGRSSFYCLEYFPSQMLRTGNNFQFSYEFENVPFHSSYAHSQSLDRLMNPLIDQYLYYLSKTINGSGQNQQTLKFSVAGPSNMAVQGRNYIPGPSYRQQRVSTTVTQNNNSEFAWPGASSWALNGRNSLMNPGPAMASHKEGEDRFFPLSGSLIFGKQGTGRDNVDADKVMITNEEEIKTTNPVATESYGQVATNCQSAQAQAQTGWVQNQGILPGMVWQDRDVYLQGPIWAKIPHTDGNFHPSPLMGGFGMKHPPPQILIKNTPVPADPPTAFNKDKLNSFITQYSTGQVSVEIEWELQKENSKRWNPEIQYTSNYYKSNNVEFAVNTEGVYSEPRPIGTRYLTRNL

SEQ ID NO: 41 - DNA, 2208 bp, synthetic construct
  misc_feature 1..2208: note = Adeno Associated Virus Capsid Protein Variant
  source 1..2208: mol_type = other DNA
atggctgccgatggttatcttccagattggctcgaggacaaccttagtgaaggaattcgcgagtggtgggctttgaaacctggagcccctcaacccaaggcaaatcaacaacatcaagacaacgctcgaggtcttgtgcttccgggttacaaataccttggacccggcaacggactcgacaagggggagccggtcaacgcagcagacgcggcggccctcgagcacgacaaggcctacgaccagcagctcaaggccggagacaacccgtacctcaagtacaaccacgccgacgccgagttccaggagcggctcaaagaagatacgtcttttgggggcaacctcgggcgagcagtcttccaggccaaaaagaggcttcttgaacctcttggtctggttgaggaagcggctaagacggctcctggaaagaagaggcctgtagagcagtctcctcaggaaccggactcctccgcgggtattggcaaatcgggtgcacagcccgctaaaaagagactcaatttcggtcagactggcgacacagagtcagtcccagaccctcaaccaatcggagaacctcccgcagccccctcaggtgtgggatctcttacaatggcttcaggtggtggcgcaccagtggcagacaataacgaaggtgccgatggagtgggtagttcctcgggaaattggcattgcgattcccaatggctgggggacagagtcatcaccaccagcacccgaacctgggccctgcccacctacaacaatcacctctacaagcaaatctccaacagcacatctggaggatcttcaaatgacaacgcctacttcggctacagcaccccctgggggtattttgacttcaacagattccactgccacttctcaccacgtgactggcagcgactcatcaacaacaactggggattccggcctaagcgactcaacttcaagctcttcaacattcaggtcaaagaggttacggacaacaatggagtcaagaccatcgccaataaccttaccagcacggtccaggtcttcacggactcagactatcagctcccgtacgtgctcgggtcggctcacgagggctgcctcccgccgttcccagcggacgttttcatgattcctcagtacgggtatctgacgcttaatgatggaagccaggccgtgggtcgttcgtccttttactgcctggaatatttcccgtcgcaaatgctaagaacgggtaacaacttccagttcagctacgagtttgagaacgtacctttccatagcagctacgctcacagccaaagcctggaccgactaatgaatccactcatcgaccaatacttgtactatctctcaaagactattaacggttctggacagaatcaacaaacgctaaaattcagtgtggccggacccagcaacatggctgtccagggaagaaactacatacctggacccagctaccgacaacaacgtgtctcaaccactgtgactcaaaacaacaacagcgaatttgcttggcctggagcttcttcttgggctctcaatggacgtaatagcttgatgaatcctggacctgctatggccagccacaaagaaggagaggaccgtttcgggcctttgtctggatctttaatttttggcaaacaaggaactggaagagacaacgtggatgcggacaaagtcatgataaccaacgaagaagaaattaaaactactaacccggtagcaacggagtcctatggacaagtggccacaaaccaccagagtgcccaagcacaggcgcagaccggctgggttcaaaaccaaggaatacttccgggtatggtttggcaggacagagatgtgtacctgcaaggacccatttgggccaaaattcctcacacggacggcaactttcacccttctccgctgatgggagggtttggaatgaagcacccgcctcctcagatcctcatcaaaaacacacctgtacctgcggatcctccaacggccttcaacaaggacaagctgaactctttcatcacccagtattctactggccaagtcagcgtggagatcgagtgggagctgcagaaggaaaacagcaagcgctggaacccggagatccagtacacttccaactattacaagtctaataatgttgaatttgctgttaatactgaaggtgtatatagtgaaccccgccccattggcaccagatacctgactcgtaatctg

SEQ ID NO: 42 - protein, 736 aa, synthetic construct
  REGION 1..736: note = Adeno Associated Virus Capsid Protein Variant
MAADGYLPDWLEDNLSEGIREWWALKPGAPQPKANQQHQDNARGLVLPGYKYLGPGNGLDKGEPVNAADAAALEHDKAYDQQLKAGDNPYLKYNHADAEFQERLKEDTSFGGNLGRAVFQAKKRLLEPLGLVEEAAKTAPGKKRPVEQSPQEPDSSAGIGKSGAQPAKKRLNFGQTGDTESVPDPQPIGEPPAAPSGVGSLTMASGGGAPVADNNEGADGVGSSSGNWHCDSQWLGDRVITTSTRTWALPTYNNHLYKQISNSTSGGSSNDNAYFGYSTPWGYFDFNRFHCHFSPRDWQRLINNNWGFRPKRLNFKLFNIQVKEVTDNNGVKTIANNLTSTVQVFTDSDYQLPYVLGSAHEGCLPPFPADVFMIPQYGYLTLNDGSQAVGRSSFYCLEYFPSQMLRTGNNFQFSYEFENVPFHSSYAHSQSLDRLMNPLIDQYLYYLSKTINGSGQNQQTLKFSVAGPSNMAVQGRNYIPGPSYRQQRVSTTVTQNNNSEFAWPGASSWALNGRNSLMNPGPAMASHKEGEDRFGPLSGSLIFGKQGTGRDNVDADKVMITNEEEIKTTNPVATESYGQVATNHQSAQAQAQTGWVQNQGILPGMVWQDRDVYLQGPIWAKIPHTDGNFHPSPLMGGFGMKHPPPQILIKNTPVPADPPTAFNKDKLNSFITQYSTGQVSVEIEWELQKENSKRWNPEIQYTSNYYKSNNVEFAVNTEGVYSEPRPIGTRYLTRNL

SEQ ID NO: 43 - DNA, 2208 bp, synthetic construct
  misc_feature 1..2208: note = Adeno Associated Virus Capsid Protein Variant
  source 1..2208: mol_type = other DNA
atggctgccgatggttatcttccagattggctcgaggacaaccttagtgaaggaattcgcgagtggtgggctttgaaacctggagcccctcaacccaaggcaaatcaacaacatcaagacaacgctcgaggtcttgtgcttccgggttacaaataccttggacccggcaacggactcgacaagggggagccggtcaacgcagcagacgcggcggccctcgagcacgacaaggcctacgaccagcagctcaaggccggagacaacccgtacctcaagtacaaccacgccgacgccgagttccaggagcggctcaaagaagatacgtcttttgggggcaacctcgggcgagcagtcttccaggccaaaaagaggcttcttgaacctcttggtctggttgaggaagcggctaagacggctcctggaaagaagaggcctgtagagcagtctcctcaggaaccggactcctccgcgggtattggcaaatcgggtgcacagcccgctaaaaagagactcaatttcggtcagactggcgacacagagtcagtcccagaccctcaaccaatcggagaacctcccgcagccccctcaggtgtgggatctcttacaatggcttcaggtggtggcgcaccagtggcagacaataacgaaggtgccgatggagtgggtagttcctcgggaaattggcattgcgattcccaatggctgggggacagagtcatcaccaccagcacccgaacctgggccctgcccacctacaacaatcacctctacaagcaaatctccaacagcacatctggaggatcttcaaatgacaacgcctacttcggctacagcaccccctgggggtattttgacttcaacagattccactgccacttctcaccacgtgactggcagcgactcatcaacaacaactggggattccggcctaagcgactcaacttcaagctcttcaacattcaggtcaaagaggttacggacaacaatggagtcaagaccatcgccaataaccttaccagcacggtccaggtcttcacggactcagactatcagctcccgtacgtgctcgggtcggctcacgagggctgcctcccgccgttcccagcggacgttttcatgattcctcagtacgggtatctgacgcttaatgatggaagccaggccgtgggtcgttcgtccttttactgcctggaatatttcccgtcgcaaatgctaagaacgggtaacaacttccagttcagctacgagtttgagaacgtacctttccatagcagctacgctcacagccaaagcctggaccgactaatgaatccactcatcgaccaatacttgtactatctctcaaagactattaacggttctggacagaatcaacaaacgctaaaattcagtgtggccggacccagcaacatggctgtccagggaagaaactacatacctggacccagctaccgacaacaacgtgtctcaaccactgtgactcaaaacaacaacagcgaatttgcttggcctggagcttcttcttgggctctcaatggacgtaatagcttgatgaatcctggacctgctatggccagccacaaagaaggagaggaccgtttctttcctttgtctggatctttaatttttggcaaacaaggaactggaagagacaacgtggatgcggacaaagtcatgataaccaacgaagaagaaattaaaactactaacccggtagcaacggagtcctatggacaagtggccacaaaccacatgagtgcccaagcacaggcgcagaccggctgggttcaaaaccaaggaatacttccgggtatggtttggcaggacagagatgtgtacctgcaaggacccatttgggccaaaattcctcacacggacggcaactttcacccttctccgctgatgggagggtttggaatgaagcacccgcctcctcagatcctcatcaaaaacacacctgtacctgcggatcctccaacggccttcaacaaggacaagctgaactctttcatcacccagtattctactggccaagtcagcgtggagatcgagtgggagctgcagaaggaaaacagcaagcgctggaacccggagatccagtacacttccaactattacaagtctaataatgttgaatttgctgttaatactgaaggtgtatatagtgaaccccgccccattggcaccagatacctgactcgtaatctg

SEQ ID NO: 44 - protein, 736 aa, synthetic construct
  REGION 1..736: note = Adeno Associated Virus Capsid Protein Variant
MAADGYLPDWLEDNLSEGIREWWALKPGAPQPKANQQHQDNARGLVLPGYKYLGPGNGLDKGEPVNAADAAALEHDKAYDQQLKAGDNPYLKYNHADAEFQERLKEDTSFGGNLGRAVFQAKKRLLEPLGLVEEAAKTAPGKKRPVEQSPQEPDSSAGIGKSGAQPAKKRLNFGQTGDTESVPDPQPIGEPPAAPSGVGSLTMASGGGAPVADNNEGADGVGSSSGNWHCDSQWLGDRVITTSTRTWALPTYNNHLYKQISNSTSGGSSNDNAYFGYSTPWGYFDFNRFHCHFSPRDWQRLINNNWGFRPKRLNFKLFNIQVKEVTDNNGVKTIANNLTSTVQVFTDSDYQLPYVLGSAHEGCLPPFPADVFMIPQYGYLTLNDGSQAVGRSSFYCLEYFPSQMLRTGNNFQFSYEFENVPFHSSYAHSQSLDRLMNPLIDQYLYYLSKTINGSGQNQQTLKFSVAGPSNMAVQGRNYIPGPSYRQQRVSTTVTQNNNSEFAWPGASSWALNGRNSLMNPGPAMASHKEGEDRFFPLSGSLIFGKQGTGRDNVDADKVMITNEEEIKTTNPVATESYGQVATNHMSAQAQAQTGWVQNQGILPGMVWQDRDVYLQGPIWAKIPHTDGNFHPSPLMGGFGMKHPPPQILIKNTPVPADPPTAFNKDKLNSFITQYSTGQVSVEIEWELQKENSKRWNPEIQYTSNYYKSNNVEFAVNTEGVYSEPRPIGTRYLTRNL

SEQ ID NO: 45 - DNA, 2208 bp, synthetic construct
  misc_feature 1..2208: note = Adeno Associated Virus Capsid Protein Variant
  source 1..2208: mol_type = other DNA
atggctgccgatggttatcttccagattggctcgaggacaaccttagtgaaggaattcgcgagtggtgggctttgaaacctggagcccctcaacccaaggcaaatcaacaacatcaagacaacgctcgaggtcttgtgcttccgggttacaaataccttggacccggcaacggactcgacaagggggagccggtcaacgcagcagacgcggcggccctcgagcacgacaaggcctacgaccagcagctcaaggccggagacaacccgtacctcaagtacaaccacgccgacgccgagttccaggagcggctcaaagaagatacgtcttttgggggcaacctcgggcgagcagtcttccaggccaaaaagaggcttcttgaacctcttggtctggttgaggaagcggctaagacggctcctggaaagaagaggcctgtagagcagtctcctcaggaaccggactcctccgcgggtattggcaaatcgggtgcacagcccgctaaaaagagactcaatttcggtcagactggcgacacagagtcagtcccagaccctcaaccaatcggagaacctcccgcagccccctcaggtgtgggatctcttacaatggcttcaggtggtggcgcaccagtggcagacaataacgaaggtgccgatggagtgggtagttcctcgggaaattggcattgcgattcccaatggctgggggacagagtcatcaccaccagcacccgaacctgggccctgcccacctacaacaatcacctctacaagcaaatctccaacagcacatctggaggatcttcaaatgacaacgcctacttcggctacagcaccccctgggggtattttgacttcaacagattccactgccacttctcaccacgtgactggcagcgactcatcaacaacaactggggattccggcctaagcgactcaacttcaagctcttcaacattcaggtcaaagaggttacggacaacaatggagtcaagaccatcgccaataaccttaccagcacggtccaggtcttcacggactcagactatcagctcccgtacgtgctcgggtcggctcacgagggctgcctcccgccgttcccagcggacgttttcatgattcctcagtacgggtatctgacgcttaatgatggaagccaggccgtgggtcgttcgtccttttactgcctggaatatttcccgtcgcaaatgctaagaacgggtaacaacttccagttcagctacgagtttgagaacgtacctttccatagcagctacgctcacagccaaagcctggaccgactaatgaatccactcatcgaccaatacttgtactatctctcaaagactattaacggttctggacagaatcaacaaacgctaaaattcagtgtggccggacccagcaacatggctgtccagggaagaaactacatacctggacccagctaccgacaacaacgtgtctcaaccactgtgactcaaaacaacaacagcgaatttgcttggcctggagcttcttcttgggctctcaatggacgtaatagcttgatgaatcctggacctgctatggccagccacaaagaaggagaggaccgtttctttcctttgtctggatctttaatttttggcaaacaaggaactggaagagacaacgtggatgcggacaaagtcatgataaccaacgaagaagaaattaaaactactaacccggtagcaacggagtcctatggacaagtggccacaaaccaccagagtgcccaagcacaggcggctaccggctgggttcaaaaccaaggaatacttccgggtatggtttggcaggacagagatgtgtacctgcaaggacccatttgggccaaaattcctcacacggacggcaactttcacccttctccgctgatgggagggtttggaatgaagcacccgcctcctcagatcctcatcaaaaacacacctgtacctgcggatcctccaacggccttcaacaaggacaagctgaactctttcatcacccagtattctactggccaagtcagcgtggagatcgagtgggagctgcagaaggaaaacagcaagcgctggaacccggagatccagtacacttccaactattacaagtctaataatgttgaatttgctgttaatactgaaggtgtatatagtgaaccccgccccattggcaccagatacctgactcgtaatctg

SEQ ID NO: 46 - protein, 736 aa, synthetic construct
  REGION 1..736: note = Adeno Associated Virus Capsid Protein Variant
MAADGYLPDWLEDNLSEGIREWWALKPGAPQPKANQQHQDNARGLVLPGYKYLGPGNGLDKGEPVNAADAAALEHDKAYDQQLKAGDNPYLKYNHADAEFQERLKEDTSFGGNLGRAVFQAKKRLLEPLGLVEEAAKTAPGKKRPVEQSPQEPDSSAGIGKSGAQPAKKRLNFGQTGDTESVPDPQPIGEPPAAPSGVGSLTMASGGGAPVADNNEGADGVGSSSGNWHCDSQWLGDRVITTSTRTWALPTYNNHLYKQISNSTSGGSSNDNAYFGYSTPWGYFDFNRFHCHFSPRDWQRLINNNWGFRPKRLNFKLFNIQVKEVTDNNGVKTIANNLTSTVQVFTDSDYQLPYVLGSAHEGCLPPFPADVFMIPQYGYLTLNDGSQAVGRSSFYCLEYFPSQMLRTGNNFQFSYEFENVPFHSSYAHSQSLDRLMNPLIDQYLYYLSKTINGSGQNQQTLKFSVAGPSNMAVQGRNYIPGPSYRQQRVSTTVTQNNNSEFAWPGASSWALNGRNSLMNPGPAMASHKEGEDRFFPLSGSLIFGKQGTGRDNVDADKVMITNEEEIKTTNPVATESYGQVATNHQSAQAQAATGWVQNQGILPGMVWQDRDVYLQGPIWAKIPHTDGNFHPSPLMGGFGMKHPPPQILIKNTPVPADPPTAFNKDKLNSFITQYSTGQVSVEIEWELQKENSKRWNPEIQYTSNYYKSNNVEFAVNTEGVYSEPRPIGTRYLTRNL

SEQ ID NO: 47 - DNA, 2208 bp, synthetic construct
  misc_feature 1..2208: note = Adeno Associated Virus Capsid Protein Variant
  source 1..2208: mol_type = other DNA
atggctgccgatggttatcttccagattggctcgaggacaaccttagtgaaggaattcgcgagtggtgggctttgaaacctggagcccctcaacccaaggcaaatcaacaacatcaagacaacgctcgaggtcttgtgcttccgggttacaaataccttggacccggcaacggactcgacaagggggagccggtcaacgcagcagacgcggcggccctcgagcacgacaaggcctacgaccagcagctcaaggccggagacaacccgtacctcaagtacaaccacgccgacgccgagttccaggagcggctcaaagaagatacgtcttttgggggcaacctcgggcgagcagtcttccaggccaaaaagaggcttcttgaacctcttggtctggttgaggaagcggctaagacggctcctggaaagaagaggcctgtagagcagtctcctcaggaaccggactcctccgcgggtattggcaaatcgggtgcacagcccgctaaaaagagactcaatttcggtcagactggcgacacagagtcagtcccagaccctcaaccaatcggagaacctcccgcagccccctcaggtgtgggatctcttacaatggcttcaggtggtggcgcaccagtggcagacaataacgaaggtgccgatggagtgggtagttcctcgggaaattggcattgcgattcccaatggctgggggacagagtcatcaccaccagcacccgaacctgggccctgcccacctacaacaatcacctctacaagcaaatctccaacagcacatctggaggatcttcaaatgacaacgcctacttcggctacagcaccccctgggggtattttgacttcaacagattccactgccacttctcaccacgtgactggcagcgactcatcaacaacaactggggattccggcctaagcgactcaacttcaagctcttcaacattcaggtcaaagaggttacggacaacaatggagtcaagaccatcgccaataaccttaccagcacggtccaggtcttcacggactcagactatcagctcccgtacgtgctcgggtcggctcacgagggctgcctcccgccgttcccagcggacgttttcatgattcctcagtacgggtatctgacgcttaatgatggaagccaggccgtgggtcgttcgtccttttactgcctggaatatttcccgtcgcaaatgctaagaacgggtaacaacttccagttcagctacgagtttgagaacgtacctttccatagcagctacgctcacagccaaagcctggaccgactaatgaatccactcatcgaccaatacttgtactatctctcaaagactattaacggttctggacagaatcaagctacgctaaaattcagtgtggccggacccagcaacatggctgtccagggaagaaactacatacctggacccagctaccgacaacaacgtgtctcaaccactgtgactcaaaacaacaacagcgaatttgcttggcctggagcttcttcttgggctctcaatggacgtaatagcttgatgaatcctggacctgctatggccagccacaaagaaggagaggaccgtttctttcctttgtctggatctttaatttttggcaaacaaggaactggaagagacaacgtggatgcggacaaagtcatgataaccaacgaagaagaaattaaaactactaacccggtagcaacggagtcctatggacaagtggccacaaaccaccagagtgcccaagcacaggcgcagaccggctgggttcaaaaccaaggaatacttccgggtatggtttggcaggacagagatgtgtacctgcaaggacccatttgggccaaaattcctcacacggacggcaactttcacccttctccgctgatgggagggtttggaatgaagcacccgcctcctcagatcctcatcaaaaacacacctgtacctgcggatcctccaacggccttcaacaaggacaagctgaactctttcatcacccagtattctactggccaagtcagcgtggagatcgagtgggagctgcagaaggaaaacagcaagcgctggaacccggagatccagtacacttccaactattacaagtctaataatgttgaatttgctgttaatactgaaggtgtatatagtgaaccccgccccattggcaccagatacctgactcgtaatctg

SEQ ID NO: 48 - protein, 736 aa, synthetic construct
  REGION 1..736: note = Adeno Associated Virus Capsid Protein Variant
MAADGYLPDWLEDNLSEGIREWWALKPGAPQPKANQQHQDNARGLVLPGYKYLGPGNGLDKGEPVNAADAAALEHDKAYDQQLKAGDNPYLKYNHADAEFQERLKEDTSFGGNLGRAVFQAKKRLLEPLGLVEEAAKTAPGKKRPVEQSPQEPDSSAGIGKSGAQPAKKRLNFGQTGDTESVPDPQPIGEPPAAPSGVGSLTMASGGGAPVADNNEGADGVGSSSGNWHCDSQWLGDRVITTSTRTWALPTYNNHLYKQISNSTSGGSSNDNAYFGYSTPWGYFDFNRFHCHFSPRDWQRLINNNWGFRPKRLNFKLFNIQVKEVTDNNGVKTIANNLTSTVQVFTDSDYQLPYVLGSAHEGCLPPFPADVFMIPQYGYLTLNDGSQAVGRSSFYCLEYFPSQMLRTGNNFQFSYEFENVPFHSSYAHSQSLDRLMNPLIDQYLYYLSKTINGSGQNQATLKFSVAGPSNMAVQGRNYIPGPSYRQQRVSTTVTQNNNSEFAWPGASSWALNGRNSLMNPGPAMASHKEGEDRFFPLSGSLIFGKQGTGRDNVDADKVMITNEEEIKTTNPVATESYGQVATNHQSAQAQAQTGWVQNQGILPGMVWQDRDVYLQGPIWAKIPHTDGNFHPSPLMGGFGMKHPPPQILIKNTPVPADPPTAFNKDKLNSFITQYSTGQVSVEIEWELQKENSKRWNPEIQYTSNYYKSNNVEFAVNTEGVYSEPRPIGTRYLTRNL

SEQ ID NO: 49 - DNA, 2208 bp, synthetic construct
  misc_feature 1..2208: note = Adeno Associated Virus Capsid Protein Variant
  source 1..2208: mol_type = other DNA
atggctgccgatggttatcttccagattggctcgaggacaaccttagtgaaggaattcgcgagtggtgggctttgaaacctggagcccctcaacccaaggcaaatcaacaacatcaagacaacgctcgaggtcttgtgcttccgggttacaaataccttggacccggcaacggactcgacaagggggagccggtcaacgcagcagacgcggcggccctcgagcacgacaaggcctacgaccagcagctcaaggccggagacaacccgtacctcaagtacaaccacgccgacgccgagttccaggagcggctcaaagaagatacgtcttttgggggcaacctcgggcgagcagtcttccaggccaaaaagaggcttcttgaacctcttggtctggttgaggaagcggctaagacggctcctggaaagaagaggcctgtagagcagtctcctcaggaaccggactcctccgcgggtattggcaaatcgggtgcacagcccgctaaaaagagactcaatttcggtcagactggcgacacagagtcagtcccagaccctcaaccaatcggagaacctcccgcagccccctcaggtgtgggatctcttacaatggcttcaggtggtggcgcaccagtggcagacaataacgaaggtgccgatggagtgggtagttcctcgggaaattggcattgcgattcccaatggctgggggacagagtcatcaccaccagcacccgaacctgggccctgcccacctacaacaatcacctctacaagcaaatctccaacagcacatctggaggatcttcaaatgacaacgcctacttcggctacagcaccccctgggggtattttgacttcaacagattccactgccacttctcaccacgtgactggcagcgactcatcaacaacaactggggattccggcctaagcgactcaacttcaagctcttcaacattcaggtcaaagaggttacggacaacaatggagtcaagaccatcgccaataaccttaccagcacggtccaggtcttcacggactcagactatcagctcccgtacgtgctcgggtcggctcacgagggctgcctcccgccgttcccagcggacgttttcatgattcctcagtacgggtatctgacgcttaatgatggaagccaggccgtgggtcgttcgtccttttactgcctggaatatttcccgtcgcaaatgctaagaacgggtaacaacttccagttcagctacgagtttgagaacgtacctttccatagcagctacgctcacagccaaagcctggaccgactaatgaatccactcatcgaccaatacttgtactatctctcaaagactattaacggttctggacagaatcaacaaacgctaaaattcagtgtggccggacccagcaacatggctgtccagggaagaaactacatacctggacccagctaccgacaacaacgtgtctcaacccaggtgactcaaaacaacaacagcgaatttgcttggcctggagcttcttcttgggctctcaatggacgtaatagcttgatgaatcctggacctgctatggccagccacaaagaaggagaggaccgtttctttcctttgtctggatctttaatttttggcaaacaaggaactggaagagacaacgtggatgcggacaaagtcatgataaccaacgaagaagaaattaaaactactaacccggtagcaacggagtcctatggacaagtggccacaaaccaccagagtgcccaagcacaggcgcagaccggctgggttcaaaaccaaggaatacttccgggtatggtttggcaggacagagatgtgtacctgcaaggacccatttgggccaaaattcctcacacggacggcaactttcacccttctccgctgatgggagggtttggaatgaagcacccgcctcctcagatcctcatcaaaaacacacctgtacctgcggatcctccaacggccttcaacaaggacaagctgaactctttcatcacccagtattctactggccaagtcagcgtggagatcgagtgggagctgcagaaggaaaacagcaagcgctggaacccggagatccagtacacttccaactattacaagtctaataatgttgaatttgctgttaatactgaaggtgtatatagtgaaccccgccccattggcaccagatacctgactcgtaatctg

SEQ ID NO: 50 - protein, 736 aa, synthetic construct
  REGION 1..736: note = Adeno Associated Virus Capsid Protein Variant
MAADGYLPDWLEDNLSEGIREWWALKPGAPQPKANQQHQDNARGLVLPGYKYLGPGNGLDKGEPVNAADAAALEHDKAYDQQLKAGDNPYLKYNHADAEFQERLKEDTSFGGNLGRAVFQAKKRLLEPLGLVEEAAKTAPGKKRPVEQSPQEPDSSAGIGKSGAQPAKKRLNFGQTGDTESVPDPQPIGEPPAAPSGVGSLTMASGGGAPVADNNEGADGVGSSSGNWHCDSQWLGDRVITTSTRTWALPTYNNHLYKQISNSTSGGSSNDNAYFGYSTPWGYFDFNRFHCHFSPRDWQRLINNNWGFRPKRLNFKLFNIQVKEVTDNNGVKTIANNLTSTVQVFTDSDYQLPYVLGSAHEGCLPPFPADVFMIPQYGYLTLNDGSQAVGRSSFYCLEYFPSQMLRTGNNFQFSYEFENVPFHSSYAHSQSLDRLMNPLIDQYLYYLSKTINGSGQNQQTLKFSVAGPSNMAVQGRNYIPGPSYRQQRVSTQVTQNNNSEFAWPGASSWALNGRNSLMNPGPAMASHKEGEDRFFPLSGSLIFGKQGTGRDNVDADKVMITNEEEIKTTNPVATESYGQVATNHQSAQAQAQTGWVQNQGILPGMVWQDRDVYLQGPIWAKIPHTDGNFHPSPLMGGFGMKHPPPQILIKNTPVPADPPTAFNKDKLNSFITQYSTGQVSVEIEWELQKENSKRWNPEIQYTSNYYKSNNVEFAVNTEGVYSEPRPIGTRYLTRNL

SEQ ID NO: 51 - DNA, 2208 bp, synthetic construct
  misc_feature 1..2208: note = Adeno Associated Virus Capsid Protein Variant
  source 1..2208: mol_type = other DNA
atggctgccgatggttatcttccagattggctcgaggacaaccttagtgaaggaattcgcgagtggtgggctttgaaacctggagcccctcaacccaaggcaaatcaacaacatcaagacaacgctcgaggtcttgtgcttccgggttacaaataccttggacccggcaacggactcgacaagggggagccggtcaacgcagcagacgcggcggccctcgagcacgacaaggcctacgaccagcagctcaaggccggagacaacccgtacctcaagtacaaccacgccgacgccgagttccaggagcggctcaaagaagatacgtcttttgggggcaacctcgggcgagcagtcttccaggccaaaaagaggcttcttgaacctcttggtctggttgaggaagcggctaagacggctcctggaaagaagaggcctgtagagcagtctcctcaggaaccggactcctccgcgggtattggcaaatcgggtgcacagcccgctaaaaagagactcaatttcggtcagactggcgacacagagtcagtcccagaccctcaaccaatcggagaacctcccgcagccccctcaggtgtgggatctcttacaatggcttcaggtggtggcgcaccagtggcagacaataacgaaggtgccgatggagtgggtagttcctcgggaaattggcattgcgattcccaatggctgggggacagagtcatcaccaccagcacccgaacctgggccctgcccacctacaacaatcacctctacaagcaaatctccaacagcacatctggaggatcttcaaatgacaacgcctacttcggctacagcaccccctgggggtattttgacttcaacagattccactgccacttctcaccacgtgactggcagcgactcatcaacaacaactggggattccggcctaagcgactcaacttcaagctcttcaacattcaggtcaaagaggttacggacaacaatggagtcaagaccatcgccaataaccttaccagcacggtccaggtcttcacggactcagactatcagctcccgtacgtgctcgggtcggctcacgagggctgcctcccgccgttcccagcggacgttttcatgattcctcagtacgggtatctgacgcttaatgatggaagccaggccgtgggtcgttcgtccttttactgcctggaatatttcccgtcgcaaatgctaagaacgggtaacaacttccagttcagctacgagtttgagaacgtacctttccatagcagctacgctcacagccaaagcctggaccgactaatgaatccactcatcgaccaatacttgtactatctctcaaagactattaacggttctggacagaatcaaaggacgctaaaattcagtgtggccggacccagcaacatggctgtccagggaagaaactacatacctggacccagctaccgacaacaacgtgtctcaaccactgtgactcaaaacaacaacagcgaatttgcttggcctggagcttcttcttgggctctcaatggacgtaatagcttgatgaatcctggacctgctatggccagccacaaagaaggagaggaccgtttctttcctttgtctggatctttaatttttggcaaacaaggaactggaagagacaacgtggatgcggacaaagtcatgataaccaacgaagaagaaattaaaactactaacccggtagcaacggagtcctatggacaagtggccacaaaccaccagagtgcccaagcacaggcgcagaccggctgggttcaaaaccaaggaatacttccgggtatggtttggcaggacagagatgtgtacctgcaaggacccatttgggccaaaattcctcacacggacggcaactttcacccttctccgctgatgggagggtttggaatgaagcacccgcctcctcagatcctcatcaaaaacacacctgtacctgcggatcctccaacggccttcaacaaggacaagctgaactctttcatcacccagtattctactggccaagtcagcgtggagatcgagtgggagctgcagaaggaaaacagcaagcgctggaacccggagatccagtacacttccaactattacaagtctaataatgttgaatttgctgttaatactgaaggtgtatatagtgaaccccgccccattggcaccagatacctgactcgtaatctg

SEQ ID NO: 52 - protein, 736 aa, synthetic construct
  REGION 1..736: note = Adeno Associated Virus Capsid Protein Variant
MAADGYLPDWLEDNLSEGIREWWALKPGAPQPKANQQHQDNARGLVLPGYKYLGPGNGLDKGEPVNAADAAALEHDKAYDQQLKAGDNPYLKYNHADAEFQERLKEDTSFGGNLGRAVFQAKKRLLEPLGLVEEAAKTAPGKKRPVEQSPQEPDSSAGIGKSGAQPAKKRLNFGQTGDTESVPDPQPIGEPPAAPSGVGSLTMASGGGAPVADNNEGADGVGSSSGNWHCDSQWLGDRVITTSTRTWALPTYNNHLYKQISNSTSGGSSNDNAYFGYSTPWGYFDFNRFHCHFSPRDWQRLINNNWGFRPKRLNFKLFNIQVKEVTDNNGVKTIANNLTSTVQVFTDSDYQLPYVLGSAHEGCLPPFPADVFMIPQYGYLTLNDGSQAVGRSSFYCLEYFPSQMLRTGNNFQFSYEFENVPFHSSYAHSQSLDRLMNPLIDQYLYYLSKTINGSGQNQRTLKFSVAGPSNMAVQGRNYIPGPSYRQQRVSTTVTQNNNSEFAWPGASSWALNGRNSLMNPGPAMASHKEGEDRFFPLSGSLIFGKQGTGRDNVDADKVMITNEEEIKTTNPVATESYGQVATNHQSAQAQAQTGWVQNQGILPGMVWQDRDVYLQGPIWAKIPHTDGNFHPSPLMGGFGMKHPPPQILIKNTPVPADPPTAFNKDKLNSFITQYSTGQVSVEIEWELQKENSKRWNPEIQYTSNYYKSNNVEFAVNTEGVYSEPRPIGTRYLTRNL

SEQ ID NO: 53 - DNA, 2208 bp, synthetic construct
  misc_feature 1..2208: note = Adeno Associated Virus Capsid Protein Variant
  source 1..2208: mol_type = other DNA
atggctgccgatggttatcttccagattggctcgaggacaaccttagtgaaggaattcgcgagtggtgggctttgaaacctggagcccctcaacccaaggcaaatcaacaacatcaagacaacgctcgaggtcttgtgcttccgggttacaaataccttggacccggcaacggactcgacaagggggagccggtcaacgcagcagacgcggcggccctcgagcacgacaaggcctacgaccagcagctcaaggccggagacaacccgtacctcaagtacaaccacgccgacgccgagttccaggagcggctcaaagaagatacgtcttttgggggcaacctcgggcgagcagtcttccaggccaaaaagaggcttcttgaacctcttggtctggttgaggaagcggctaagacggctcctggaaagaagaggcctgtagagcagtctcctcaggaaccggactcctccgcgggtattggcaaatcgggtgcacagcccgctaaaaagagactcaatttcggtcagactggcgacacagagtcagtcccagaccctcaaccaatcggagaacctcccgcagccccctcaggtgtgggatctcttacaatggcttcaggtggtggcgcaccagtggcagacaataacgaaggtgccgatggagtgggtagttcctcgggaaattggcattgcgattcccaatggctgggggacagagtcatcaccaccagcacccgaacctgggccctgcccacctacaacaatcacctctacaagcaaatctccaacagcacatctggaggatcttcaaatgacaacgcctacttcggctacagcaccccctgggggtattttgacttcaacagattccactgccacttctcaccacgtgactggcagcgactcatcaacaacaactggggattccggcctaagcgactcaacttcaagctcttcaacattcaggtcaaagaggttacggacaacaatggagtcaagaccatcgccaataaccttaccagcacggtccaggtcttcacggactcagactatcagctcccgtacgtgctcgggtcggctcacgagggctgcctcccgccgttcccagcggacgttttcatgattcctcagtacgggtatctgacgcttaatgatggaagccaggccgtgggtcgttcgtccttttactgcctggaatatttcccgtcgcaaatgctaagaacgggtaacaacttccagttcagctacgagtttgagaacgtacctttccatagcagctacgctcacagccaaagcctggaccgactaatgaatccactcatcgaccaatacttgtactatctctcaaagactattaacggttctggacagaatcaacaaacgctaaaattcagtgtggccggacccagcaacatggctgtccagggaagaaactacatacctggacccagctaccgacaacaacgtgtctcaaccactgtgactcaaaacaacaacagcgaatttgcttggcctggagcttcttcttgggctctcaatggacgtaatagcttgatgaatcctggacctgctatggccagccacaaagaaggagaggaccgtttctttcctttgtctggatctttaatttttggcaaacaaggaactggaagagacaacgtggatgcggacaaagtcatgataaccaacgaagaagaaattaaaactactaacccggtagcaacggagtcctatggacaagtggccacaaaccaccagagtgcccaagcacaggcgcagaccggctgggttcaaaaccaaggaatacttccgggtatggtttggcaggacagagatgtgtacctgcaaggacccatttgggccaaaattcctcacacggacggcaactttcacccttctccgctgatgggagggtttggaatgaagcacccgcctcctcagatcctcatcaaaaacacacctgtacctgcggatcctccaacgtggttcaacaaggacaagctgaactctttcatcacccagtattctactggccaagtcagcgtggagatcgagtgggagctgcagaaggaaaacagcaagcgctggaacccggagatccagtacacttccaactattacaagtctaataatgttgaatttgctgttaatactgaaggtgtatatagtgaaccccgccccattggcaccagatacctgactcgtaatctg

SEQ ID NO: 54 - protein, 736 aa, synthetic construct
  REGION 1..736: note = Adeno Associated Virus Capsid Protein Variant
MAADGYLPDWLEDNLSEGIREWWALKPGAPQPKANQQHQDNARGLVLPGYKYLGPGNGLDKGEPVNAADAAALEHDKAYDQQLKAGDNPYLKYNHADAEFQERLKEDTSFGGNLGRAVFQAKKRLLEPLGLVEEAAKTAPGKKRPVEQSPQEPDSSAGIGKSGAQPAKKRLNFGQTGDTESVPDPQPIGEPPAAPSGVGSLTMASGGGAPVADNNEGADGVGSSSGNWHCDSQWLGDRVITTSTRTWALPTYNNHLYKQISNSTSGGSSNDNAYFGYSTPWGYFDFNRFHCHFSPRDWQRLINNNWGFRPKRLNFKLFNIQVKEVTDNNGVKTIANNLTSTVQVFTDSDYQLPYVLGSAHEGCLPPFPADVFMIPQYGYLTLNDGSQAVGRSSFYCLEYFPSQMLRTGNNFQFSYEFENVPFHSSYAHSQSLDRLMNPLIDQYLYYLSKTINGSGQNQQTLKFSVAGPSNMAVQGRNYIPGPSYRQQRVSTTVTQNNNSEFAWPGASSWALNGRNSLMNPGPAMASHKEGEDRFFPLSGSLIFGKQGTGRDNVDADKVMITNEEEIKTTNPVATESYGQVATNHQSAQAQAQTGWVQNQGILPGMVWQDRDVYLQGPIWAKIPHTDGNFHPSPLMGGFGMKHPPPQILIKNTPVPADPPTWFNKDKLNSFITQYSTGQVSVEIEWELQKENSKRWNPEIQYTSNYYKSNNVEFAVNTEGVYSEPRPIGTRYLTRNL

SEQ ID NO: 55 - DNA, 2208 bp, synthetic construct
  misc_feature 1..2208: note = Adeno Associated Virus Capsid Protein Variant
  source 1..2208: mol_type = other DNA
atggctgccgatggttatcttccagattggctcgaggacaaccttagtgaaggaattcgcgagtggtgggctttgaaacctggagcccctcaacccaaggcaaatcaacaacatcaagacaacgctcgaggtcttgtgcttccgggttacaaataccttggacccggcaacggactcgacaagggggagccggtcaacgcagcagacgcggcggccctcgagcacgacaaggcctacgaccagcagctcaaggccggagacaacccgtacctcaagtacaaccacgccgacgccgagttccaggagcggctcaaagaagatacgtcttttgggggcaacctcgggcgagcagtcttccaggccaaaaagaggcttcttgaacctcttggtctggttgaggaagcggctaagacggctcctggaaagaagaggcctgtagagcagtctcctcaggaaccggactcctccgcgggtattggcaaatcgggtgcacagcccgctaaaaagagactcaatttcggtcagactggcgacacagagtcagtcccagaccctcaaccaatcggagaacctcccgcagccccctcaggtgtgggatctcttacaatggcttcaggtggtggcgcaccagtggcagacaataacgaaggtgccgatggagtgggtagttcctcgggaaattggcattgcgattcccaatggctgggggacagagtcatcaccaccagcacccgaacctgggccctgcccacctacaacaatcacctctacaagcaaatctccaacagcacatctggaggatcttcaaatgacaacgcctacttcggctacagcaccccctgggggtattttgacttcaacagattccactgccacttctcaccacgtgactggcagcgactcatcaacaacaactggggattccggcctaagcgactcaacttcaagctcttcaacattcaggtcaaagaggttacggacaacaatggagtcaagaccatcgccaataaccttaccagcacggtccaggtcttcacggactcagactatcagctcccgtacgtgctcgggtcggctcacgagggctgcctcccgccgttcccagcggacgttttcatgattcctcagtacgggtatctgacgcttaatgatggaagccaggccgtgggtcgttcgtccttttactgcctggaatatttcccgtcgcaaatgctaagaacgggtaacaacttccagttcagctacgagtttgagaacgtacctttccatagcagctacgctcacagccaaagcctggaccgactaatgaatccactcatcgaccaatacttgtactatctctcaaagactattaacggttctggacagaatcaacaaacgctaaaattcagtgtggccggacccagcaacatggctgtccagggaagaaactacatacctggacccagctaccgacaacaacgtgtctcaaccactgtgactcaaaacaacaacagcgaatttgcttggcctggagcttcttcttgggctctcaatggacgtaatagcttgatgaatcctggacctgctatggccagccacaaagaaggagaggaccgtttctttcctttgtctggatctttaatttttggcaaacaaggaactggaagagacaacgtggatgcggacaaagtcatgataaccaacgaagaagaaattaaaactactaacccggtagcaacggagtcctatggacaagtggccacaaaccaccagagtgcccaagcacaggcgttgaccggctgggttcaaaaccaaggaatacttccgggtatggtttggcaggacagagatgtgtacctgcaaggacccatttgggccaaaattcctcacacggacggcaactttcacccttctccgctgatgggagggtttggaatgaagcacccgcctcctcagatcctcatcaaaaacacacctgtacctgcggatcctccaacggccttcaacaaggacaagctgaactctttcatcacccagtattctactggccaagtcagcgtggagatcgagtgggagctgcagaaggaaaacagcaagcgctggaacccggagatccagtacacttccaactattacaagtctaataatgttgaatttgctgttaatactgaaggtgtatatagtgaaccccgccccattggcaccagatacctgactcgtaatctg

SEQ ID NO: 56 - protein, 736 aa, synthetic construct
  REGION 1..736: note = Adeno Associated Virus Capsid Protein Variant
MAADGYLPDWLEDNLSEGIREWWALKPGAPQPKANQQHQDNARGLVLPGYKYLGPGNGLDKGEPVNAADAAALEHDKAYDQQLKAGDNPYLKYNHADAEFQERLKEDTSFGGNLGRAVFQAKKRLLEPLGLVEEAAKTAPGKKRPVEQSPQEPDSSAGIGKSGAQPAKKRLNFGQTGDTESVPDPQPIGEPPAAPSGVGSLTMASGGGAPVADNNEGADGVGSSSGNWHCDSQWLGDRVITTSTRTWALPTYNNHLYKQISNSTSGGSSNDNAYFGYSTPWGYFDFNRFHCHFSPRDWQRLINNNWGFRPKRLNFKLFNIQVKEVTDNNGVKTIANNLTSTVQVFTDSDYQLPYVLGSAHEGCLPPFPADVFMIPQYGYLTLNDGSQAVGRSSFYCLEYFPSQMLRTGNNFQFSYEFENVPFHSSYAHSQSLDRLMNPLIDQYLYYLSKTINGSGQNQQTLKFSVAGPSNMAVQGRNYIPGPSYRQQRVSTTVTQNNNSEFAWPGASSWALNGRNSLMNPGPAMASHKEGEDRFFPLSGSLIFGKQGTGRDNVDADKVMITNEEEIKTTNPVATESYGQVATNHQSAQAQALTGWVQNQGILPGMVWQDRDVYLQGPIWAKIPHTDGNFHPSPLMGGFGMKHPPPQILIKNTPVPADPPTAFNKDKLNSFITQYSTGQVSVEIEWELQKENSKRWNPEIQYTSNYYKSNNVEFAVNTEGVYSEPRPIGTRYLTRNL

SEQ ID NO: 57 - DNA, 2208 bp, synthetic construct
  misc_feature 1..2208: note = Adeno Associated Virus Capsid Protein Variant
  source 1..2208: mol_type = other DNA
atggctgccgatggttatcttccagattggctcgaggacaaccttagtgaaggaattcgcgagtggtgggctttgaaacctggagcccctcaacccaaggcaaatcaacaacatcaagacaacgctcgaggtcttgtgcttccgggttacaaataccttggacccggcaacggactcgacaagggggagccggtcaacgcagcagacgcggcggccctcgagcacgacaaggcctacgaccagcagctcaaggccggagacaacccgtacctcaagtacaaccacgccgacgccgagttccaggagcggctcaaagaagatacgtcttttgggggcaacctcgggcgagcagtcttccaggccaaaaagaggcttcttgaacctcttggtctggttgaggaagcggctaagacggctcctggaaagaagaggcctgtagagcagtctcctcaggaaccggactcctccgcgggtattggcaaatcgggtgcacagcccgctaaaaagagactcaatttcggtcagactggcgacacagagtcagtcccagaccctcaaccaatcggagaacctcccgcagccccctcaggtgtgggatctcttacaatggcttcaggtggtggcgcaccagtggcagacaataacgaaggtgccgatggagtgggtagttcctcgggaaattggcattgcgattcccaatggctgggggacagagtcatcaccaccagcacccgaacctgggccctgcccacctacaacaatcacctctacaagcaaatctccaacagcacatctggaggatcttcaaatgacaacgcctacttcggctacagcaccccctgggggtattttgacttcaacagattccactgccacttctcaccacgtgactggcagcgactcatcaacaacaactggggattccggcctaagcgactcaacttcaagctcttcaacattcaggtcaaagaggttacggacaacaatggagtcaagaccatcgccaataaccttaccagcacggtccaggtcttcacggactcagactatcagctcccgtacgtgctcgggtcggctcacgagggctgcctcccgccgttcccagcggacgttttcatgattcctcagtacgggtatctgacgcttaatgatggaagccaggccgtgggtcgttcgtccttttactgcctggaatatttcccgtcgcaaatgctaagaacgggtaacaacttccagttcagctacgagtttgagaacgtacctttccatagcagctacgctcacagccaaagcctggaccgactaatgaatccactcatcgaccaatacttgtactatctctcaaagactattaacggttctggacagaatcaacaaacgctaaaattcagtgtggccggacccagcaacatggctgtccagggaagaaactacatacctggacccagctaccgacaacaacgtgtctcaaccactgtgactcaaaacaacaacagcgaatttgcttggcctggagcttcttcttgggctctcaatggacgtaatagcttgatgaatcctggacctgctatggccagccacaaagaaggagaggaccgtttctttcctttgtctggatctttaatttttggcaaacaaggaactggaagagacaacgtggatgcggacaaagtcatgataaccaacgaagaagaaattaaaactactaacccggtagcaacggagtcctatggacaagtggccacaaaccaccagagtgcccaagcacaggcgcagaccggctgggttcaaaaccaaggaatacttccgggtatggtttggcaggacagagatgtgtacctgcaaggacccatttgggccaaaattcctcacacggacggcaactttcacccttctccgctgatgggagggtttggaatgaagcacccgcctcctcagatcctcatcaaaaacacacctgtacctgcggatcctccaacggccttcaacaaggacattctgaactctttcatcacccagtattctactggccaagtcagcgtggagatcgagtgggagctgcagaaggaaaacagcaagcgctggaacccggagatccagtacacttccaactattacaagtctaataatgttgaatttgctgttaatactgaaggtgtatatagtgaaccccgccccattggcaccagatacctgactcgtaatctg

SEQ ID NO: 58 - protein, 736 aa, synthetic construct
  REGION 1..736: note = Adeno Associated Virus Capsid Protein Variant
MAADGYLPDWLEDNLSEGIREWWALKPGAPQPKANQQHQDNARGLVLPGYKYLGPGNGLDKGEPVNAADAAALEHDKAYDQQLKAGDNPYLKYNHADAEFQERLKEDTSFGGNLGRAVFQAKKRLLEPLGLVEEAAKTAPGKKRPVEQSPQEPDSSAGIGKSGAQPAKKRLNFGQTGDTESVPDPQPIGEPPAAPSGVGSLTMASGGGAPVADNNEGADGVGSSSGNWHCDSQWLGDRVITTSTRTWALPTYNNHLYKQISNSTSGGSSNDNAYFGYSTPWGYFDFNRFHCHFSPRDWQRLINNNWGFRPKRLNFKLFNIQVKEVTDNNGVKTIANNLTSTVQVFTDSDYQLPYVLGSAHEGCLPPFPADVFMIPQYGYLTLNDGSQAVGRSSFYCLEYFPSQMLRTGNNFQFSYEFENVPFHSSYAHSQSLDRLMNPLIDQYLYYLSKTINGSGQNQQTLKFSVAGPSNMAVQGRNYIPGPSYRQQRVSTTVTQNNNSEFAWPGASSWALNGRNSLMNPGPAMASHKEGEDRFFPLSGSLIFGKQGTGRDNVDADKVMITNEEEIKTTNPVATESYGQVATNHQSAQAQAQTGWVQNQGILPGMVWQDRDVYLQGPIWAKIPHTDGNFHPSPLMGGFGMKHPPPQILIKNTPVPADPPTAFNKDILNSFITQYSTGQVSVEIEWELQKENSKRWNPEIQYTSNYYKSNNVEFAVNTEGVYSEPRPIGTRYLTRNL

SEQ ID NO: 59 - DNA, 2208 bp, synthetic construct
  misc_feature 1..2208: note = Adeno Associated Virus Capsid Protein Variant
  source 1..2208: mol_type = other DNA
atggctgccgatggttatcttccagattggctcgaggacaaccttagtgaaggaattcgcgagtggtgggctttgaaacctggagcccctcaacccaaggcaaatcaacaacatcaagacaacgctcgaggtcttgtgcttccgggttacaaataccttggacccggcaacggactcgacaagggggagccggtcaacgcagcagacgcggcggccctcgagcacgacaaggcctacgaccagcagctcaaggccggagacaacccgtacctcaagtacaaccacgccgacgccgagttccaggagcggctcaaagaagatacgtcttttgggggcaacctcgggcgagcagtcttccaggccaaaaagaggcttcttgaacctcttggtctggttgaggaagcggctaagacggctcctggaaagaagaggcctgtagagcagtctcctcaggaaccggactcctccgcgggtattggcaaatcgggtgcacagcccgctaaaaagagactcaatttcggtcagactggcgacacagagtcagtcccagaccctcaaccaatcggagaacctcccgcagccccctcaggtgtgggatctcttacaatggcttcaggtggtggcgcaccagtggcagacaataacgaaggtgccgatggagtgggtagttcctcgggaaattggcattgcgattcccaatggctgggggacagagtcatcaccaccagcacccgaacctgggccctgcccacctacaacaatcacctctacaagcaaatctccaacagcacatctggaggatcttcaaatgacaacgcctacttcggctacagcaccccctgggggtattttgacttcaacagattccactgccacttctcaccacgtgactggcagcgactcatcaacaacaactggggattccggcctaagcgactcaacttcaagctcttcaacattcaggtcaaagaggttacggacaacaatggagtcaagaccatcgccaataaccttaccagcacggtccaggtcttcacggactcagactatcagctcccgtacgtgctcgggtcggctcacgagggctgcctcccgccgttcccagcggacgttttcatgattcctcagtacgggtatctgacgcttaatgatggaagccaggccgtgggtcgttcgtccttttactgcctggaatatttcccgtcgcaaatgctaagaacgggtaacaacttccagttcagctacgagtttgagaacgtacctttccatagcagctacgctcacagccaaagcctggaccgactaatgaatccactcatcgaccaatacttgtactatctctcaaagactattaacggttctggacagaatcaacaaacgctaaaattcagtgtggccggacccagcaacatggctgtccagggaagaaactacatacctggacccagctaccgacaacaacgtgtctcaaccactgtgactcaaaacaacaacagcgaatttgcttggcctggagcttcttcttgggctctcaatggacgtaatagcttgatgaatcctggacctgctatggccagccacaaagaaggagaggaccgtttcctgcctttgtctggatctttaatttttggcaaacaaggaactggaagagacaacgtggatgcggacaaagtcatgataaccaacgaagaagaaattaaaactactaacccggtagcaacggagtcctatggacaagtggccacaaaccaccagagtgcccaagcacaggcgcagaccggctgggttcaaaaccaaggaatacttccgggtatggtttggcaggacagagatgtgtacctgcaaggacccatttgggccaaaattcctcacacggacggcaactttcacccttctccgctgatgggagggtttggaatgaagcacccgcctcctcagatcctcatcaaaaacacacctgtacctgcggatcctccaacggccttcaacaaggacaagctgaactctttcatcacccagtattctactggccaagtcagcgtggagatcgagtgggagctgcagaaggaaaacagcaagcgctggaacccggagatccagtacacttccaactattacaagtctaataatgttgaatttgctgttaatactgaaggtgtatatagtgaaccccgccccattggcaccagatacctgactcgtaatctg

SEQ ID NO: 60 - protein, 736 aa, synthetic construct
  REGION 1..736: note = Adeno Associated Virus Capsid Protein Variant
MAADGYLPDWLEDNLSEGIREWWALKPGAPQPKANQQHQDNARGLVLPGYKYLGPGNGLDKGEPVNAADAAALEHDKAYDQQLKAGDNPYLKYNHADAEFQERLKEDTSFGGNLGRAVFQAKKRLLEPLGLVEEAAKTAPGKKRPVEQSPQEPDSSAGIGKSGAQPAKKRLNFGQTGDTESVPDPQPIGEPPAAPSGVGSLTMASGGGAPVADNNEGADGVGSSSGNWHCDSQWLGDRVITTSTRTWALPTYNNHLYKQISNSTSGGSSNDNAYFGYSTPWGYFDFNRFHCHFSPRDWQRLINNNWGFRPKRLNFKLFNIQVKEVTDNNGVKTIANNLTSTVQVFTDSDYQLPYVLGSAHEGCLPPFPADVFMIPQYGYLTLNDGSQAVGRSSFYCLEYFPSQMLRTGNNFQFSYEFENVPFHSSYAHSQSLDRLMNPLIDQYLYYLSKTINGSGQNQQTLKFSVAGPSNMAVQGRNYIPGPSYRQQRVSTTVTQNNNSEFAWPGASSWALNGRNSLMNPGPAMASHKEGEDRFLPLSGSLIFGKQGTGRDNVDADKVMITNEEEIKTTNPVATESYGQVATNHQSAQAQAQTGWVQNQGILPGMVWQDRDVYLQGPIWAKIPHTDGNFHPSPLMGGFGMKHPPPQILIKNTPVPADPPTAFNKDKLNSFITQYSTGQVSVEIEWELQKENSKRWNPEIQYTSNYYKSNNVEFAVNTEGVYSEPRPIGTRYLTRNL

SEQ ID NO: 61 - DNA, 2208 bp, synthetic construct
  misc_feature 1..2208: note = Adeno Associated Virus Capsid Protein Variant
  source 1..2208: mol_type = other DNA
atggctgccgatggttatcttccagattggctcgaggacaaccttagtgaaggaattcgcgagtggtgggctttgaaacctggagcccctcaacccaaggcaaatcaacaacatcaagacaacgctcgaggtcttgtgcttccgggttacaaataccttggacccggcaacggactcgacaagggggagccggtcaacgcagcagacgcggcggccctcgagcacgacaaggcctacgaccagcagctcaaggccggagacaacccgtacctcaagtacaaccacgccgacgccgagttccaggagcggctcaaagaagatacgtcttttgggggcaacctcgggcgagcagtcttccaggccaaaaagaggcttcttgaacctcttggtctggttgaggaagcggctaagacggctcctggaaagaagaggcctgtagagcagtctcctcaggaaccggactcctccgcgggtattggcaaatcgggtgcacagcccgctaaaaagagactcaatttcggtcagactggcgacacagagtcagtcccagaccctcaaccaatcggagaacctcccgcagccccctcaggtgtgggatctcttacaatggcttcaggtggtggcgcaccagtggcagacaataacgaaggtgccgatggagtgggtagttcctcgggaaattggcattgcgattcccaatggctgggggacagagtcatcaccaccagcacccgaacctgggccctgcccacctacaacaatcacctctacaagcaaatctccaacagcacatctggaggatcttcaaatgacaacgcctacttcggctacagcaccccctgggggtattttgacttcaacagattccactgccacttctcaccacgtgactggcagcgactcatcaacaacaactggggattccggcctaagcgactcaacttcaagctcttcaacattcaggtcaaagaggttacggacaacaatggagtcaagaccatcgccaataaccttaccagcacggtccaggtcttcacggactcagactatcagctcccgtacgtgctcgggtcggctcacgagggctgcctcccgccgttcccagcggacgttttcatgattcctcagtacgggtatctgacgcttaatgatggaagccaggccgtgggtcgttcgtccttttactgcctggaatatttcccgtcgcaaatgctaagaacgggtaacaacttccagttcagctacgagtttgagaacgtacctttccatagcagctacgctcacagccaaagcctggaccgactaatgaatccactcatcgaccaatacttgtactatctctcaaagactattaacggttctggacagaatcaacaaacgctaaaattcagtgtggccggacccagcaacatggctgtccagggaagaaactacatacctggacccagctaccgacaacaacgtgtctcaaccactgtgactcaaaacaacaacagcgaatttgcttggcctggagcttcttcttgggctctcaatggacgtaatagcttgatgaatcctggacctgctatggccagccacaaagaaggagaggaccgtttctttcctttgtctggatctttaatttttggcaaacaaggaactggaagagacaacgtggatgcggacaaagtcatgataaccaacgaagaagaaattaaaactactaacccggtagcaacggagtcctatggacaagtggccacaaaccaccagagtgtgcaagcacaggcgcagaccggctgggttcaaaaccaaggaatacttccgggtatggtttggcaggacagagatgtgtacctgcaaggacccatttgggccaaaattcctcacacggacggcaactttcacccttctccgctgatgggagggtttggaatgaagcacccgcctcctcagatcctcatcaaaaacacacctgtacctgcggatcctccaacggccttcaacaaggacaagctgaactctttcatcacccagtattctactggccaagtcagcgtggagatcgagtgggagctgcagaaggaaaacagcaagcgctggaacccggagatccagtacacttccaactattacaagtctaataatgttgaatttgctgttaatactgaaggtgtatatagtgaaccccgccccattggcaccagatacctgactcgtaatctg

SEQ ID NO: 62 - protein, 736 aa, synthetic construct
  REGION 1..736: note = Adeno Associated Virus Capsid Protein Variant
MAADGYLPDWLEDNLSEGIREWWALKPGAPQPKANQQHQDNARGLVLPGYKYLGPGNGLDKGEPVNAADAAALEHDKAYDQQLKAGDNPYLKYNHADAEFQERLKEDTSFGGNLGRAVFQAKKRLLEPLGLVEEAAKTAPGKKRPVEQSPQEPDSSAGIGKSGAQPAKKRLNFGQTGDTESVPDPQPIGEPPAAPSGVGSLTMASGGGAPVADNNEGADGVGSSSGNWHCDSQWLGDRVITTSTRTWALPTYNNHLYKQISNSTSGGSSNDNAYFGYSTPWGYFDFNRFHCHFSPRDWQRLINNNWGFRPKRLNFKLFNIQVKEVTDNNGVKTIANNLTSTVQVFTDSDYQLPYVLGSAHEGCLPPFPADVFMIPQYGYLTLNDGSQAVGRSSFYCLEYFPSQMLRTGNNFQFSYEFENVPFHSSYAHSQSLDRLMNPLIDQYLYYLSKTINGSGQNQQTLKFSVAGPSNMAVQGRNYIPGPSYRQQRVSTTVTQNNNSEFAWPGASSWALNGRNSLMNPGPAMASHKEGEDRFFPLSGSLIFGKQGTGRDNVDADKVMITNEEEIKTTNPVATESYGQVATNHQSVQAQAQTGWVQNQGILPGMVWQDRDVYLQGPIWAKIPHTDGNFHPSPLMGGFGMKHPPPQILIKNTPVPADPPTAFNKDKLNSFITQYSTGQVSVEIEWELQKENSKRWNPEIQYTSNYYKSNNVEFAVNTEGVYSEPRPIGTRYLTRNL

SEQ ID NO: 63 - DNA, 2208 bp, synthetic construct
  misc_feature 1..2208: note = Adeno Associated Virus Capsid Protein Variant
  source 1..2208: mol_type = other DNA
atggctgccgatggttatcttccagattggctcgaggacaaccttagtgaaggaattcgcgagtggtgggctttgaaacctggagcccctcaacccaaggcaaatcaacaacatcaagacaacgctcgaggtcttgtgcttccgggttacaaataccttggacccggcaacggactcgacaagggggagccggtcaacgcagcagacgcggcggccctcgagcacgacaaggcctacgaccagcagctcaaggccggagacaacccgtacctcaagtacaaccacgccgacgccgagttccaggagcggctcaaagaagatacgtcttttgggggcaacctcgggcgagcagtcttccaggccaaaaagaggcttcttgaacctcttggtctggttgaggaagcggctaagacggctcctggaaagaagaggcctgtagagcagtctcctcaggaaccggactcctccgcgggtattggcaaatcgggtgcacagcccgctaaaaagagactcaatttcggtcagactggcgacacagagtcagtcccagaccctcaaccaatcggagaacctcccgcagccccctcaggtgtgggatctcttacaatggcttcaggtggtggcgcaccagtggcagacaataacgaaggtgccgatggagtgggtagttcctcgggaaattggcattgcgattcccaatggctgggggacagagtcatcaccaccagcacccgaacctgggccctgcccacctacaacaatcacctctacaagcaaatctccaacagcacatctggaggatcttcaaatgacaacgcctacttcggctacagcaccccctgggggtattttgacttcaacagattccactgccacttctcaccacgtgactggcagcgactcatcaacaacaactggggattccggcctaagcgactcaacttcaagctcttcaacattcaggtcaaagaggttacggacaacaatggagtcaagaccatcgccaataaccttaccagcacggtccaggtcttcacggactcagactatcagctcccgtacgtgctcgggtcggctcacgagggctgcctcccgccgttcccagcggacgttttcatgattcctcagtacgggtatctgacgcttaatgatggaagccaggccgtgggtcgttcgtccttttactgcctggaatatttcccgtcgcaaatgctaagaacgggtaacaacttccagttcagctacgagtttgagaacgtacctttccatagcagctacgctcacagccaaagcctggaccgactaatgaatccactcatcgaccaatacttgtactatctctcaaagactattaacggttctggacagaatcaacaaacgctaaaattcagtgtggccggacccagcaacatggctgtccagggaagaaactacatacctggacccagctaccgacaacaacgtgtctcaaccactgtgactcaaaacaacaacagcgaatttgcttggcctggagcttcttcttgggctctcaatggacgtaatagcttgatgaatcctggacctgctatggccagccacaaagaaggagaggaccgtttctttcctttgtctggatctttaatttttggcaaacaaaggactggaagagacaacgtggatgcggacaaagtcatgataaccaacgaagaagaaattaaaactactaacccggtagcaacggagtcctatggacaagtggccacaaaccaccagagtgcccaagcacaggcgcagaccggctgggttcaaaaccaaggaatacttccgggtatggtttggcaggacagagatgtgtacctgcaaggacccatttgggccaaaattcctcacacggacggcaactttcacccttctccgctgatgggagggtttggaatgaagcacccgcctcctcagatcctcatcaaaaacacacctgtacctgcggatcctccaacggccttcaacaaggacaagctgaactctttcatcacccagtattctactggccaagtcagcgtggagatcgagtgggagctgcagaaggaaaacagcaagcgctggaacccggagatccagtacacttccaactattacaagtctaataatgttgaatttgctgttaatactgaaggtgtatatagtgaaccccgccccattggcaccagatacctgactcgtaatctg

SEQ ID NO: 64 - protein, 736 aa, synthetic construct
  REGION 1..736: note = Adeno Associated Virus Capsid Protein Variant
MAADGYLPDWLEDNLSEGIREWWALKPGAPQPKANQQHQDNARGLVLPGYKYLGPGNGLDKGEPVNAADAAALEHDKAYDQQLKAGDNPYLKYNHADAEFQERLKEDTSFGGNLGRAVFQAKKRLLEPLGLVEEAAKTAPGKKRPVEQSPQEPDSSAGIGKSGAQPAKKRLNFGQTGDTESVPDPQPIGEPPAAPSGVGSLTMASGGGAPVADNNEGADGVGSSSGNWHCDSQWLGDRVITTSTRTWALPTYNNHLYKQISNSTSGGSSNDNAYFGYSTPWGYFDFNRFHCHFSPRDWQRLINNNWGFRPKRLNFKLFNIQVKEVTDNNGVKTIANNLTSTVQVFTDSDYQLPYVLGSAHEGCLPPFPADVFMIPQYGYLTLNDGSQAVGRSSFYCLEYFPSQMLRTGNNFQFSYEFENVPFHSSYAHSQSLDRLMNPLIDQYLYYLSKTINGSGQNQQTLKFSVAGPSNMAVQGRNYIPGPSYRQQRVSTTVTQNNNSEFAWPGASSWALNGRNSLMNPGPAMASHKEGEDRFFPLSGSLIFGKQRTGRDNVDADKVMITNEEEIKTTNPVATESYGQVATNHQSAQAQAQTGWVQNQGILPGMVWQDRDVYLQGPIWAKIPHTDGNFHPSPLMGGFGMKHPPPQILIKNTPVPADPPTAFNKDKLNSFITQYSTGQVSVEIEWELQKENSKRWNPEIQYTSNYYKSNNVEFAVNTEGVYSEPRPIGTRYLTRNL

SEQ ID NO: 65 - DNA, 2208 bp, synthetic construct
  misc_feature 1..2208: note = Adeno Associated Virus Capsid Protein Variant
  source 1..2208: mol_type = other DNA
atggctgccgatggttatcttccagattggctcgaggacaaccttagtgaaggaattcgcgagtggtgggctttgaaacctggagcccctcaacccaaggcaaatcaacaacatcaagacaacgctcgaggtcttgtgcttccgggttacaaataccttggacccggcaacggactcgacaagggggagccggtcaacgcagcagacgcggcggccctcgagcacgacaaggcctacgaccagcagctcaaggccggagacaacccgtacctcaagtacaaccacgccgacgccgagttccaggagcggctcaaagaagatacgtcttttgggggcaacctcgggcgagcagtcttccaggccaaaaagaggcttcttgaacctcttggtctggttgaggaagcggctaagacggctcctggaaagaagaggcctgtagagcagtctcctcaggaaccggactcctccgcgggtattggcaaatcgggtgcacagcccgctaaaaagagactcaatttcggtcagactggcgacacagagtcagtcccagaccctcaaccaatcggagaacctcccgcagccccctcaggtgtgggatctcttacaatggcttcaggtggtggcgcaccagtggcagacaataacgaaggtgccgatggagtgggtagttcctcgggaaattggcattgcgattcccaatggctgggggacagagtcatcaccaccagcacccgaacctgggccctgcccacctacaacaatcacctctacaagcaaatctccaacagcacatctggaggatcttcaaatgacaacgcctacttcggctacagcaccccctgggggtattttgacttcaacagattccactgccacttctcaccacgtgactggcagcgactcatcaacaacaactggggattccggcctaagcgactcaacttcaagctcttcaacattcaggtcaaagaggttacggacaacaatggagtcaagaccatcgccaataaccttaccagcacggtccaggtcttcacggactcagactatcagctcccgtacgtgctcgggtcggctcacgagggctgcctcccgccgttcccagcggacgttttcatgattcctcagtacgggtatctgacgcttaatgatggaagccaggccgtgggtcgttcgtccttttactgcctggaatatttcccgtcgcaaatgctaagaacgggtaacaacttccagttcagctacgagtttgagaacgtacctttccatagcagctacgctcacagccaaagcctggaccgactaatgaatccactcatcgaccaatacttgtactatctctcaaagactattaacggttctggacagaatcaacaaacgctaaaattcagtgtggccggacccagcaacatggctgtccagggaagaaactacatacctggacccagctaccgacaacaacgtgtctcaaccactgtgactcaaaacaacaacagcgcgtttgcttggcctggagcttcttcttgggctctcaatggacgtaatagcttgatgaatcctggacctgctatggccagccacaaagaaggagaggaccgtttctttcctttgtctggatctttaatttttggcaaacaaggaactggaagagacaacgtggatgcggacaaagtcatgataaccaacgaagaagaaattaaaactactaacccggtagcaacggagtcctatggacaagtggccacaaaccaccagagtgcccaagcacaggcgcagaccggctgggttcaaaaccaaggaatacttccgggtatggtttggcaggacagagatgtgtacctgcaaggacccatttgggccaaaattcctcacacggacggcaactttcacccttctccgctgatgggagggtttggaatgaagcacccgcctcctcagatcctcatcaaaaacacacctgtacctgcggatcctccaacggccttcaacaaggacaagctgaactctttcatcacccagtattctactggccaagtcagcgtggagatcgagtgggagctgcagaaggaaaacagcaagcgctggaacccggagatccagtacacttccaactattacaagtctaataatgttgaatttgctgttaatactgaaggtgtatatagtgaaccccgccccattggcaccagatacctgactcgtaatctg

SEQ ID NO: 66 - protein, 736 aa, synthetic construct
  REGION 1..736: note = Adeno Associated Virus Capsid Protein Variant
MAADGYLPDWLEDNLSEGIREWWALKPGAPQPKANQQHQDNARGLVLPGYKYLGPGNGLDKGEPVNAADAAALEHDKAYDQQLKAGDNPYLKYNHADAEFQERLKEDTSFGGNLGRAVFQAKKRLLEPLGLVEEAAKTAPGKKRPVEQSPQEPDSSAGIGKSGAQPAKKRLNFGQTGDTESVPDPQPIGEPPAAPSGVGSLTMASGGGAPVADNNEGADGVGSSSGNWHCDSQWLGDRVITTSTRTWALPTYNNHLYKQISNSTSGGSSNDNAYFGYSTPWGYFDFNRFHCHFSPRDWQRLINNNWGFRPKRLNFKLFNIQVKEVTDNNGVKTIANNLTSTVQVFTDSDYQLPYVLGSAHEGCLPPFPADVFMIPQYGYLTLNDGSQAVGRSSFYCLEYFPSQMLRTGNNFQFSYEFENVPFHSSYAHSQSLDRLMNPLIDQYLYYLSKTINGSGQNQQTLKFSVAGPSNMAVQGRNYIPGPSYRQQRVSTTVTQNNNSAFAWPGASSWALNGRNSLMNPGPAMASHKEGEDRFFPLSGSLIFGKQGTGRDNVDADKVMITNEEEIKTTNPVATESYGQVATNHQSAQAQAQTGWVQNQGILPGMVWQDRDVYLQGPIWAKIPHTDGNFHPSPLMGGFGMKHPPPQILIKNTPVPADPPTAFNKDKLNSFITQYSTGQVSVEIEWELQKENSKRWNPEIQYTSNYYKSNNVEFAVNTEGVYSEPRPIGTRYLTRNL

SEQ ID NO: 67 - DNA, 2208 bp, synthetic construct
  misc_feature 1..2208: note = Adeno Associated Virus Capsid Protein Variant
  source 1..2208: mol_type = other DNA
atggctgccgatggttatcttccagattggctcgaggacaaccttagtgaaggaattcgcgagtggtgggctttgaaacctggagcccctcaacccaaggcaaatcaacaacatcaagacaacgctcgaggtcttgtgcttccgggttacaaataccttggacccggcaacggactcgacaagggggagccggtcaacgcagcagacgcggcggccctcgagcacgacaaggcctacgaccagcagctcaaggccggagacaacccgtacctcaagtacaaccacgccgacgccgagttccaggagcggctcaaagaagatacgtcttttgggggcaacctcgggcgagcagtcttccaggccaaaaagaggcttcttgaacctcttggtctggttgaggaagcggctaagacggctcctggaaagaagaggcctgtagagcagtctcctcaggaaccggactcctccgcgggtattggcaaatcgggtgcacagcccgctaaaaagagactcaatttcggtcagactggcgacacagagtcagtcccagaccctcaaccaatcggagaacctcccgcagccccctcaggtgtgggatctcttacaatggcttcaggtggtggcgcaccagtggcagacaataacgaaggtgccgatggagtgggtagttcctcgggaaattggcattgcgattcccaatggctgggggacagagtcatcaccaccagcacccgaacctgggccctgcccacctacaacaatcacctctacaagcaaatctccaacagcacatctggaggatcttcaaatgacaacgcctacttcggctacagcaccccctgggggtattttgacttcaacagattccactgccacttctcaccacgtgactggcagcgactcatcaacaacaactggggattccggcctaagcgactcaacttcaagctcttcaacattcaggtcaaagaggttacggacaacaatggagtcaagaccatcgccaataaccttaccagcacggtccaggtcttcacggactcagactatcagctcccgtacgtgctcgggtcggctcacgagggctgcctcccgccgttcccagcggacgttttcatgattcctcagtacgggtatctgacgcttaatgatggaagccaggccgtgggtcgttcgtccttttactgcctggaatatttcccgtcgcaaatgctaagaacgggtaacaacttccagttcagctacgagtttgagaacgtacctttccatagcagctacgctcacagccaaagcctggaccgactaatgaatccactcatcgaccaatacttgtactatctctcaaagactattaacggttctggacagaatcaacaaacgctaaaattcagtgtggccggacccagcaacatggctgtccagggaagaaactacatacctggacccagctaccgacaacaacgtgtctcaaccactgtgactcaaaacaacaacagcgaatttgcttggcctggagcttcttcttgggctctcaatggacgtaatagcttgatgaatcctggacctgctatggccagccacaaagaaggagaggaccgtttctttcctttgtctggatctttaatttttggcaaacaaggaactggaagagactcggtggatgcggacaaagtcatgataaccaacgaagaagaaattaaaactactaacccggtagcaacggagtcctatggacaagtggccacaaaccaccagagtgcccaagcacaggcgcagaccggctgggttcaaaaccaaggaatacttccgggtatggtttggcaggacagagatgtgtacctgcaaggacccatttgggccaaaattcctcacacggacggcaactttcacccttctccgctgatgggagggtttggaatgaagcacccgcctcctcagatcctcatcaaaaacacacctgtacctgcggatcctccaacggccttcaacaaggacaagctgaactctttcatcacccagtattctactggccaagtcagcgtggagatcgagtgggagctgcagaaggaaaacagcaagcgctggaacccggagatccagtacacttccaactattacaagtctaataatgttgaatttgctgttaatactgaaggtgtatatagtgaaccccgccccattggcaccagatacctgactcgtaatctg

SEQ ID NO: 68 - protein, 736 aa, synthetic construct
  REGION 1..736: note = Adeno Associated Virus Capsid Protein Variant
MAADGYLPDWLEDNLSEGIREWWALKPGAPQPKANQQHQDNARGLVLPGYKYLGPGNGLDKGEPVNAADAAALEHDKAYDQQLKAGDNPYLKYNHADAEFQERLKEDTSFGGNLGRAVFQAKKRLLEPLGLVEEAAKTAPGKKRPVEQSPQEPDSSAGIGKSGAQPAKKRLNFGQTGDTESVPDPQPIGEPPAAPSGVGSLTMASGGGAPVADNNEGADGVGSSSGNWHCDSQWLGDRVITTSTRTWALPTYNNHLYKQISNSTSGGSSNDNAYFGYSTPWGYFDFNRFHCHFSPRDWQRLINNNWGFRPKRLNFKLFNIQVKEVTDNNGVKTIANNLTSTVQVFTDSDYQLPYVLGSAHEGCLPPFPADVFMIPQYGYLTLNDGSQAVGRSSFYCLEYFPSQMLRTGNNFQFSYEFENVPFHSSYAHSQSLDRLMNPLIDQYLYYLSKTINGSGQNQQTLKFSVAGPSNMAVQGRNYIPGPSYRQQRVSTTVTQNNNSEFAWPGASSWALNGRNSLMNPGPAMASHKEGEDRFFPLSGSLIFGKQGTGRDSVDADKVMITNEEEIKTTNPVATESYGQVATNHQSAQAQAQTGWVQNQGILPGMVWQDRDVYLQGPIWAKIPHTDGNFHPSPLMGGFGMKHPPPQILIKNTPVPADPPTAFNKDKLNSFITQYSTGQVSVEIEWELQKENSKRWNPEIQYTSNYYKSNNVEFAVNTEGVYSEPRPIGTRYLTRNL

SEQ ID NO: 69 - DNA, 2208 bp, synthetic construct
  misc_feature 1..2208: note = Adeno Associated Virus Capsid Protein Variant
  source 1..2208: mol_type = other DNA
atggctgccgatggttatcttccagattggctcgaggacaaccttagtgaaggaattcgcgagtggtgggctttgaaacctggagcccctcaacccaaggcaaatcaacaacatcaagacaacgctcgaggtcttgtgcttccgggttacaaataccttggacccggcaacggactcgacaagggggagccggtcaacgcagcagacgcggcggccctcgagcacgacaaggcctacgaccagcagctcaaggccggagacaacccgtacctcaagtacaaccacgccgacgccgagttccaggagcggctcaaagaagatacgtcttttgggggcaacctcgggcgagcagtcttccaggccaaaaagaggcttcttgaacctcttggtctggttgaggaagcggctaagacggctcctggaaagaagaggcctgtagagcagtctcctcaggaaccggactcctccgcgggtattggcaaatcgggtgcacagcccgctaaaaagagactcaatttcggtcagactggcgacacagagtcagtcccagaccctcaaccaatcggagaacctcccgcagccccctcaggtgtgggatctcttacaatggcttcaggtggtggcgcaccagtggcagacaataacgaaggtgccgatggagtgggtagttcctcgggaaattggcattgcgattcccaatggctgggggacagagtcatcaccaccagcacccgaacctgggccctgcccacctacaacaatcacctctacaagcaaatctccaacagcacatctggaggatcttcaaatgacaacgcctacttcggctacagcaccccctgggggtattttgacttcaacagattccactgccacttctcaccacgtgactggcagcgactcatcaacaacaactggggattccggcctaagcgactcaacttcaagctcttcaacattcaggtcaaagaggttacggacaacaatggagtcaagaccatcgccaataaccttaccagcacggtccaggtcttcacggactcagactatcagctcccgtacgtgctcgggtcggctcacgagggctgcctcccgccgttcccagcggacgttttcatgattcctcagtacgggtatctgacgcttaatgatggaagccaggccgtgggtcgttcgtccttttactgcctggaatatttcccgtcgcaaatgctaagaacgggtaacaacttccagttcagctacgagtttgagaacgtacctttccatagcagctacgctcacagccaaagcctggaccgactaatgaatccactcatcgaccaatacttgtactatctctcaaagactattaacggttctggacagaatcaacaaacgctaaaattcagtgtggccggacccagcaacatggctgtccagggaagaaactacatacctggacccagctaccgacaacaacgtgtctcaaccactgtgactcaaaacaacaacagcgaatttgcttggcctggagcttcttcttgggctctcaatggacgtaatagcttgatgaatcctggacctgctatggccagccacaaagaaggagaggaccgtttctttcctttgtctggatctttaatttttggcaaacaaggaactggaagagacaacgtggatgcggacaaagtcatgataaccaacgaagaagaaattaaaactactaacccggtagcaacggagtcctatggacaagtggccacaaaccaccagagtgcccaagcacaggcgcagaccggctgggttcaaaaccaaggaatacttccgggtatggtttggcaggacagagatgtgtacctgcaaggacccatttgggccaaaattcctcacacggacggcaactttcacccttctccgctgatgggagggtttggaatgaagcacccgcctcctcagatcctcatcaaaaacacacctgtacctgcggatcctccaacggccttcaacaaggacaagctgaactctttcatcacccagtattctactggccaagtcagcgtggagatcgagtgggagctgcagaaggaaaacagcaagcgctggaacccggagatccagtacacttccaactattggaagtctaataatgttgaatttgctgttaatactgaaggtgtatatagtgaaccccgccccattggcaccagatacctgactcgtaatctg

SEQ ID NO: 70 - protein, 736 aa, synthetic construct
  REGION 1..736: note = Adeno Associated Virus Capsid Protein Variant
MAADGYLPDWLEDNLSEGIREWWALKPGAPQPKANQQHQDNARGLVLPGYKYLGPGNGLDKGEPVNAADAAALEHDKAYDQQLKAGDNPYLKYNHADAEFQERLKEDTSFGGNLGRAVFQAKKRLLEPLGLVEEAAKTAPGKKRPVEQSPQEPDSSAGIGKSGAQPAKKRLNFGQTGDTESVPDPQPIGEPPAAPSGVGSLTMASGGGAPVADNNEGADGVGSSSGNWHCDSQWLGDRVITTSTRTWALPTYNNHLYKQISNSTSGGSSNDNAYFGYSTPWGYFDFNRFHCHFSPRDWQRLINNNWGFRPKRLNFKLFNIQVKEVTDNNGVKTIANNLTSTVQVFTDSDYQLPYVLGSAHEGCLPPFPADVFMIPQYGYLTLNDGSQAVGRSSFYCLEYFPSQMLRTGNNFQFSYEFENVPFHSSYAHSQSLDRLMNPLIDQYLYYLSKTINGSGQNQQTLKFSVAGPSNMAVQGRNYIPGPSYRQQRVSTTVTQNNNSEFAWPGASSWALNGRNSLMNPGPAMASHKEGEDRFFPLSGSLIFGKQGTGRDNVDADKVMITNEEEIKTTNPVATESYGQVATNHQSAQAQAQTGWVQNQGILPGMVWQDRDVYLQGPIWAKIPHTDGNFHPSPLMGGFGMKHPPPQILIKNTPVPADPPTAFNKDKLNSFITQYSTGQVSVEIEWELQKENSKRWNPEIQYTSNYWKSNNVEFAVNTEGVYSEPRPIGTRYLTRNL

SEQ ID NO: 71 - DNA, 2208 bp, synthetic construct
  misc_feature 1..2208: note = Adeno Associated Virus Capsid Protein Variant
  source 1..2208: mol_type = other DNA
atggctgccgatggttatcttccagattggctcgaggacaaccttagtgaaggaattcgcgagtggtgggctttgaaacctggagcccctcaacccaaggcaaatcaacaacatcaagacaacgctcgaggtcttgtgcttccgggttacaaataccttggacccggcaacggactcgacaagggggagccggtcaacgcagcagacgcggcggccctcgagcacgacaaggcctacgaccagcagctcaaggccggagacaacccgtacctcaagtacaaccacgccgacgccgagttccaggagcggctcaaagaagatacgtcttttgggggcaacctcgggcgagcagtcttccaggccaaaaagaggcttcttgaacctcttggtctggttgaggaagcggctaagacggctcctggaaagaagaggcctgtagagcagtctcctcaggaaccggactcctccgcgggtattggcaaatcgggtgcacagcccgctaaaaagagactcaatttcggtcagactggcgacacagagtcagtcccagaccctcaaccaatcggagaacctcccgcagccccctcaggtgtgggatctcttacaatggcttcaggtggtggcgcaccagtggcagacaataacgaaggtgccgatggagtgggtagttcctcgggaaattggcattgcgattcccaatggctgggggacagagtcatcaccaccagcacccgaacctgggccctgcccacctacaacaatcacctctacaagcaaatctccaacagcacatctggaggatcttcaaatgacaacgcctacttcggctacagcaccccctgggggtattttgacttcaacagattccactgccacttctcaccacgtgactggcagcgactcatcaacaacaactggggattccggcctaagcgactcaacttcaagctcttcaacattcaggtcaaagaggttacggacaacaatggagtcaagaccatcgccaataaccttaccagcacggtccaggtcttcacggactcagactatcagctcccgtacgtgctcgggtcggctcacgagggctgcctcccgccgttcccagcggacgttttcatgattcctcagtacgggtatctgacgcttaatgatggaagccaggccgtgggtcgttcgtccttttactgcctggaatatttcccgtcgcaaatgctaagaacgggtaacaacttccagttcagctacgagtttgagaacgtacctttccatagcagctacgctcacagccaaagcctggaccgactaatgaatccactcatcgaccaatacttgtactatctctcaaagactattaacggttctggacagaatcaacaaacgctaaaattcagtgtggccggacccagcaacatggctgtccagggaagaaactacatacctggacccagctaccgacaacaacgtgtctcaaccactgtgactcaaaacaacaacagcgaatttgcttggcctggagcttcttcttgggctctcaatggacgtaatagcttgatgaatcctggacctgctatggccagccacaaagaaggagaggaccgtttctttcctttgtctggatctttaatttttggcaaacaaggaactggaagagactgggtggatgcggacaaagtcatgataaccaacgaagaagaaattaaaactactaacccggtagcaacggagtcctatggacaagtggccacaaaccaccagagtgcccaagcacaggcgcagaccggctgggttcaaaaccaaggaatacttccgggtatggtttggcaggacagagatgtgtacctgcaaggacccatttgggccaaaattcctcacacggacggcaactttcacccttctccgctgatgggagggtttggaatgaagcacccgcctcctcagatcctcatcaaaaacacacctgtacctgcggatcctccaacggccttcaacaaggacaagctgaactctttcatcacccagtattctactggccaagtcagcgtggagatcgagtgggagctgcagaaggaaaacagcaagcgctggaacccggagatccagtacacttccaactattacaagtctaataatgttgaatttgctgttaatactgaaggtgtatatagtgaaccccgccccattggcaccagatacctgactcgtaatctg

SEQ ID NO: 72 - protein, 736 aa, synthetic construct
  REGION 1..736: note = Adeno Associated Virus Capsid Protein Variant
MAADGYLPDWLEDNLSEGIREWWALKPGAPQPKANQQHQDNARGLVLPGYKYLGPGNGLDKGEPVNAADAAALEHDKAYDQQLKAGDNPYLKYNHADAEFQERLKEDTSFGGNLGRAVFQAKKRLLEPLGLVEEAAKTAPGKKRPVEQSPQEPDSSAGIGKSGAQPAKKRLNFGQTGDTESVPDPQPIGEPPAAPSGVGSLTMASGGGAPVADNNEGADGVGSSSGNWHCDSQWLGDRVITTSTRTWALPTYNNHLYKQISNSTSGGSSNDNAYFGYSTPWGYFDFNRFHCHFSPRDWQRLINNNWGFRPKRLNFKLFNIQVKEVTDNNGVKTIANNLTSTVQVFTDSDYQLPYVLGSAHEGCLPPFPADVFMIPQYGYLTLNDGSQAVGRSSFYCLEYFPSQMLRTGNNFQFSYEFENVPFHSSYAHSQSLDRLMNPLIDQYLYYLSKTINGSGQNQQTLKFSVAGPSNMAVQGRNYIPGPSYRQQRVSTTVTQNNNSEFAWPGASSWALNGRNSLMNPGPAMASHKEGEDRFFPLSGSLIFGKQGTGRDWVDADKVMITNEEEIKTTNPVATESYGQVATNHQSAQAQAQTGWVQNQGILPGMVWQDRDVYLQGPIWAKIPHTDGNFHPSPLMGGFGMKHPPPQILIKNTPVPADPPTAFNKDKLNSFITQYSTGQVSVEIEWELQKENSKRWNPEIQYTSNYYKSNNVEFAVNTEGVYSEPRPIGTRYLTRNL

SEQ ID NO: 73 - DNA, 2208 bp, synthetic construct
  misc_feature 1..2208: note = Adeno Associated Virus Capsid Protein Variant
  source 1..2208: mol_type = other DNA
atggctgccgatggttatcttccagattggctcgaggacaaccttagtgaaggaattcgcgagtggtgggctttgaaacctggagcccctcaacccaaggcaaatcaacaacatcaagacaacgctcgaggtcttgtgcttccgggttacaaataccttggacccggcaacggactcgacaagggggagccggtcaacgcagcagacgcggcggccctcgagcacgacaaggcctacgaccagcagctcaaggccggagacaacccgtacctcaagtacaaccacgccgacgccgagttccaggagcggctcaaagaagatacgtcttttgggggcaacctcgggcgagcagtcttccaggccaaaaagaggcttcttgaacctcttggtctggttgaggaagcggctaagacggctcctggaaagaagaggcctgtagagcagtctcctcaggaaccggactcctccgcgggtattggcaaatcgggtgcacagcccgctaaaaagagactcaatttcggtcagactggcgacacagagtcagtcccagaccctcaaccaatcggagaacctcccgcagccccctcaggtgtgggatctcttacaatggcttcaggtggtggcgcaccagtggcagacaataacgaaggtgccgatggagtgggtagttcctcgggaaattggcattgcgattcccaatggctgggggacagagtcatcaccaccagcacccgaacctgggccctgcccacctacaacaatcacctctacaagcaaatctccaacagcacatctggaggatcttcaaatgacaacgcctacttcggctacagcaccccctgggggtattttgacttcaacagattccactgccacttctcaccacgtgactggcagcgactcatcaacaacaactggggattccggcctaagcgactcaacttcaagctcttcaacattcaggtcaaagaggttacggacaacaatggagtcaagaccatcgccaataaccttaccagcacggtccaggtcttcacggactcagactatcagctcccgtacgtgctcgggtcggctcacgagggctgcctcccgccgttcccagcggacgttttcatgattcctcagtacgggtatctgacgcttaatgatggaagccaggccgtgggtcgttcgtccttttactgcctggaatatttcccgtcgcaaatgctaagaacgggtaacaacttccagttcagctacgagtttgagaacgtacctttccatagcagctacgctcacagccaaagcctggaccgactaatgaatccactcatcgaccaatacttgtactatctctcaaagactattaacggttctggacagaatcaacaaacgctaaaattcagtgtggccggacccagcaacatggctgtccagggaagaaactacatacctggacccagctaccgacaacaacgtgtctcaaccactgtgactcaaaacaacaacagcgaatttgcttggcctggagcttcttcttgggctctcaatggacgtaatagcttgatgaatcctggacctgctatggccagccacaaagaaggagaggaccgtttctttcctttgtctggatctttaatttttggcaaacaaggaactggaagagacaacgtggatgcggacaaagtcatgataaccaacgaagaagaaattaaaactactaacccggtagcaacggagtcctatggacaagtggccacaaaccaccagagtgcccaagcacaggcgcagaccggctgggttcaaaaccaaggaatacttccgggtatggtttggcaggacagagatgtgtacctgcaaggacccatttgggccaaaattcctcacacggacggcaactttcacccttctccgctgatgggagggtttggaatgaagcacccgcctcctcagatcctcatcaaaaacacacctgtacctgcggatcctccaacggtgttcaacaaggacaagctgaactctttcatcacccagtattctactggccaagtcagcgtggagatcgagtgggagctgcagaaggaaaacagcaagcgctggaacccggagatccagtacacttccaactattacaagtctaataatgttgaatttgctgttaatactgaaggtgtatatagtgaaccccgccccattggcaccagatacctgactcgtaatctg

SEQ ID NO: 74 - protein, 736 aa, synthetic construct
  REGION 1..736: note = Adeno Associated Virus Capsid Protein Variant
MAADGYLPDWLEDNLSEGIREWWALKPGAPQPKANQQHQDNARGLVLPGYKYLGPGNGLDKGEPVNAADAAALEHDKAYDQQLKAGDNPYLKYNHADAEFQERLKEDTSFGGNLGRAVFQAKKRLLEPLGLVEEAAKTAPGKKRPVEQSPQEPDSSAGIGKSGAQPAKKRLNFGQTGDTESVPDPQPIGEPPAAPSGVGSLTMASGGGAPVADNNEGADGVGSSSGNWHCDSQWLGDRVITTSTRTWALPTYNNHLYKQISNSTSGGSSNDNAYFGYSTPWGYFDFNRFHCHFSPRDWQRLINNNWGFRPKRLNFKLFNIQVKEVTDNNGVKTIANNLTSTVQVFTDSDYQLPYVLGSAHEGCLPPFPADVFMIPQYGYLTLNDGSQAVGRSSFYCLEYFPSQMLRTGNNFQFSYEFENVPFHSSYAHSQSLDRLMNPLIDQYLYYLSKTINGSGQNQQTLKFSVAGPSNMAVQGRNYIPGPSYRQQRVSTTVTQNNNSEFAWPGASSWALNGRNSLMNPGPAMASHKEGEDRFFPLSGSLIFGKQGTGRDNVDADKVMITNEEEIKTTNPVATESYGQVATNHQSAQAQAQTGWVQNQGILPGMVWQDRDVYLQGPIWAKIPHTDGNFHPSPLMGGFGMKHPPPQILIKNTPVPADPPTVFNKDKLNSFITQYSTGQVSVEIEWELQKENSKRWNPEIQYTSNYYKSNNVEFAVNTEGVYSEPRPIGTRYLTRNL

SEQ ID NO: 75 - DNA, 2208 bp, synthetic construct
  misc_feature 1..2208: note = Adeno Associated Virus Capsid Protein Variant
  source 1..2208: mol_type = other DNA
atggctgccgatggttatcttccagattggctcgaggacaaccttagtgaaggaattcgcgagtggtgggctttgaaacctggagcccctcaacccaaggcaaatcaacaacatcaagacaacgctcgaggtcttgtgcttccgggttacaaataccttggacccggcaacggactcgacaagggggagccggtcaacgcagcagacgcggcggccctcgagcacgacaaggcctacgaccagcagctcaaggccggagacaacccgtacctcaagtacaaccacgccgacgccgagttccaggagcggctcaaagaagatacgtcttttgggggcaacctcgggcgagcagtcttccaggccaaaaagaggcttcttgaacctcttggtctggttgaggaagcggctaagacggctcctggaaagaagaggcctgtagagcagtctcctcaggaaccggactcctccgcgggtattggcaaatcgggtgcacagcccgctaaaaagagactcaatttcggtcagactggcgacacagagtcagtcccagaccctcaaccaatcggagaacctcccgcagccccctcaggtgtgggatctcttacaatggcttcaggtggtggcgcaccagtggcagacaataacgaaggtgccgatggagtgggtagttcctcgggaaattggcattgcgattcccaatggctgggggacagagtcatcaccaccagcacccgaacctgggccctgcccacctacaacaatcacctctacaagcaaatctccaacagcacatctggaggatcttcaaatgacaacgcctacttcggctacagcaccccctgggggtattttgacttcaacagattccactgccacttctcaccacgtgactggcagcgactcatcaacaacaactggggattccggcctaagcgactcaacttcaagctcttcaacattcaggtcaaagaggttacggacaacaatggagtcaagaccatcgccaataaccttaccagcacggtccaggtcttcacggactcagactatcagctcccgtacgtgctcgggtcggctcacgagggctgcctcccgccgttcccagcggacgttttcatgattcctcagtacgggtatctgacgcttaatgatggaagccaggccgtgggtcgttcgtccttttactgcctggaatatttcccgtcgcaaatgctaagaacgggtaacaacttccagttcagctacgagtttgagaacgtacctttccatagcagctacgctcacagccaaagcctggaccgactaatgaatccactcatcgaccaatacttgtactatctctcaaagactattaacggttctggacagaatcaacaaacgctaaaattcagtgtggccggacccagcaacatggctgtccagggaagaaactacatacctggacccagctaccgacaacaacgtgtctcaaccactgtgactcaaaacaacaacagcgaatttgcttggcctggagcttcttcttgggctctcaatggacgtaatagcttgatgaatcctggacctgctatggccagccacaaagaaggagaggaccgtttctttcctttgtctggatctttaatttttggcaaacaaggaactggaagagacaacgtggatgcggacaaagtcatgataaccaacgaagaagaaattaaaactactaacccggtagcaacggagtcctatggacaagtggccacaaaccaccagagtgcccaagcacaggcgcagaccggctgggttcaaaaccaaggaatacttccgggtatggtttggcaggacagagatgtgtacctgcaaggacccatttgggccaaaattcctcacacggacggcaactttcacccttctccgctgatgggagggtttggaatgaagcacccgcctcctcagatcctcatcaaaaacacacctgtacctgcggatcctccaacgcatttcaacaaggacaagctgaactctttcatcacccagtattctactggccaagtcagcgtggagatcgagtgggagctgcagaaggaaaacagcaagcgctggaacccggagatccagtacacttccaactattacaagtctaataatgttgaatttgctgttaatactgaaggtgtatatagtgaaccccgccccattggcaccagatacctgactcgtaatctg

SEQ ID NO: 76 - protein, 736 aa, synthetic construct
  REGION 1..736: note = Adeno Associated Virus Capsid Protein Variant
MAADGYLPDWLEDNLSEGIREWWALKPGAPQPKANQQHQDNARGLVLPGYKYLGPGNGLDKGEPVNAADAAALEHDKAYDQQLKAGDNPYLKYNHADAEFQERLKEDTSFGGNLGRAVFQAKKRLLEPLGLVEEAAKTAPGKKRPVEQSPQEPDSSAGIGKSGAQPAKKRLNFGQTGDTESVPDPQPIGEPPAAPSGVGSLTMASGGGAPVADNNEGADGVGSSSGNWHCDSQWLGDRVITTSTRTWALPTYNNHLYKQISNSTSGGSSNDNAYFGYSTPWGYFDFNRFHCHFSPRDWQRLINNNWGFRPKRLNFKLFNIQVKEVTDNNGVKTIANNLTSTVQVFTDSDYQLPYVLGSAHEGCLPPFPADVFMIPQYGYLTLNDGSQAVGRSSFYCLEYFPSQMLRTGNNFQFSYEFENVPFHSSYAHSQSLDRLMNPLIDQYLYYLSKTINGSGQNQQTLKFSVAGPSNMAVQGRNYIPGPSYRQQRVSTTVTQNNNSEFAWPGASSWALNGRNSLMNPGPAMASHKEGEDRFFPLSGSLIFGKQGTGRDNVDADKVMITNEEEIKTTNPVATESYGQVATNHQSAQAQAQTGWVQNQGILPGMVWQDRDVYLQGPIWAKIPHTDGNFHPSPLMGGFGMKHPPPQILIKNTPVPADPPTHFNKDKLNSFITQYSTGQVSVEIEWELQKENSKRWNPEIQYTSNYYKSNNVEFAVNTEGVYSEPRPIGTRYLTRNL

SEQ ID NO: 77 - DNA, 2208 bp, synthetic construct
  misc_feature 1..2208: note = Adeno Associated Virus Capsid Protein Variant
  source 1..2208: mol_type = other DNA
atggctgccgatggttatcttccagattggctcgaggacaaccttagtgaaggaattcgcgagtggtgggctttgaaacctggagcccctcaacccaaggcaaatcaacaacatcaagacaacgctcgaggtcttgtgcttccgggttacaaataccttggacccggcaacggactcgacaagggggagccggtcaacgcagcagacgcggcggccctcgagcacgacaaggcctacgaccagcagctcaaggccggagacaacccgtacctcaagtacaaccacgccgacgccgagttccaggagcggctcaaagaagatacgtcttttgggggcaacctcgggcgagcagtcttccaggccaaaaagaggcttcttgaacctcttggtctggttgaggaagcggctaagacggctcctggaaagaagaggcctgtagagcagtctcctcaggaaccggactcctccgcgggtattggcaaatcgggtgcacagcccgctaaaaagagactcaatttcggtcagactggcgacacagagtcagtcccagaccctcaaccaatcggagaacctcccgcagccccctcaggtgtgggatctcttacaatggcttcaggtggtggcgcaccagtggcagacaataacgaaggtgccgatggagtgggtagttcctcgggaaattggcattgcgattcccaatggctgggggacagagtcatcaccaccagcacccgaacctgggccctgcccacctacaacaatcacctctacaagcaaatctccaacagcacatctggaggatcttcaaatgacaacgcctacttcggctacagcaccccctgggggtattttgacttcaacagattccactgccacttctcaccacgtgactggcagcgactcatcaacaacaactggggattccggcctaagcgactcaacttcaagctcttcaacattcaggtcaaagaggttacggacaacaatggagtcaagaccatcgccaataaccttaccagcacggtccaggtcttcacggactcagactatcagctcccgtacgtgctcgggtcggctcacgagggctgcctcccgccgttcccagcggacgttttcatgattcctcagtacgggtatctgacgcttaatgatggaagccaggccgtgggtcgttcgtccttttactgcctggaatatttcccgtcgcaaatgctaagaacgggtaacaacttccagttcagctacgagtttgagaacgtacctttccatagcagctacgctcacagccaaagcctggaccgactaatgaatccactcatcgaccaatacttgtactatctctcaaagactattaacggttctggacagaatcaacaaacgctaaaattcagtgtggccggacccagcaacatggctgtccagggaagaaactacatacctggacccagctaccgacaacaacgtgtctcaaccactgtgactcaaaacaacaacagcttgtttgcttggcctggagcttcttcttgggctctcaatggacgtaatagcttgatgaatcctggacctgctatggccagccacaaagaaggagaggaccgtttctttcctttgtctggatctttaatttttggcaaacaaggaactggaagagacaacgtggatgcggacaaagtcatgataaccaacgaagaagaaattaaaactactaacccggtagcaacggagtcctatggacaagtggccacaaaccaccagagtgcccaagcacaggcgcagaccggctgggttcaaaaccaaggaatacttccgggtatggtttggcaggacagagatgtgtacctgcaaggacccatttgggccaaaattcctcacacggacggcaactttcacccttctccgctgatgggagggtttggaatgaagcacccgcctcctcagatcctcatcaaaaacacacctgtacctgcggatcctccaacggccttcaacaaggacaagctgaactctttcatcacccagtattctactggccaagtcagcgtggagatcgagtgggagctgcagaaggaaaacagcaagcgctggaacccggagatccagtacacttccaactattacaagtctaataatgttgaatttgctgttaatactgaaggtgtatatagtgaaccccgccccattggcaccagatacctgactcgtaatctg

SEQ ID NO: 78 - protein, 736 aa, synthetic construct
  REGION 1..736: note = Adeno Associated Virus Capsid Protein Variant
MAADGYLPDWLEDNLSEGIREWWALKPGAPQPKANQQHQDNARGLVLPGYKYLGPGNGLDKGEPVNAADAAALEHDKAYDQQLKAGDNPYLKYNHADAEFQERLKEDTSFGGNLGRAVFQAKKRLLEPLGLVEEAAKTAPGKKRPVEQSPQEPDSSAGIGKSGAQPAKKRLNFGQTGDTESVPDPQPIGEPPAAPSGVGSLTMASGGGAPVADNNEGADGVGSSSGNWHCDSQWLGDRVITTSTRTWALPTYNNHLYKQISNSTSGGSSNDNAYFGYSTPWGYFDFNRFHCHFSPRDWQRLINNNWGFRPKRLNFKLFNIQVKEVTDNNGVKTIANNLTSTVQVFTDSDYQLPYVLGSAHEGCLPPFPADVFMIPQYGYLTLNDGSQAVGRSSFYCLEYFPSQMLRTGNNFQFSYEFENVPFHSSYAHSQSLDRLMNPLIDQYLYYLSKTINGSGQNQQTLKFSVAGPSNMAVQGRNYIPGPSYRQQRVSTTVTQNNNSLFAWPGASSWALNGRNSLMNPGPAMASHKEGEDRFFPLSGSLIFGKQGTGRDNVDADKVMITNEEEIKTTNPVATESYGQVATNHQSAQAQAQTGWVQNQGILPGMVWQDRDVYLQGPIWAKIPHTDGNFHPSPLMGGFGMKHPPPQILIKNTPVPADPPTAFNKDKLNSFITQYSTGQVSVEIEWELQKENSKRWNPEIQYTSNYYKSNNVEFAVNTEGVYSEPRPIGTRYLTRNL

SEQ ID NO: 79 - DNA, 2208 bp, synthetic construct
  misc_feature 1..2208: note = Adeno Associated Virus Capsid Protein Variant
  source 1..2208: mol_type = other DNA
atggctgccgatggttatcttccagattggctcgaggacaaccttagtgaaggaattcgcgagtggtgggctttgaaacctggagcccctcaacccaaggcaaatcaacaacatcaagacaacgctcgaggtcttgtgcttccgggttacaaataccttggacccggcaacggactcgacaagggggagccggtcaacgcagcagacgcggcggccctcgagcacgacaaggcctacgaccagcagctcaaggccggagacaacccgtacctcaagtacaaccacgccgacgccgagttccaggagcggctcaaagaagatacgtcttttgggggcaacctcgggcgagcagtcttccaggccaaaaagaggcttcttgaacctcttggtctggttgaggaagcggctaagacggctcctggaaagaagaggcctgtagagcagtctcctcaggaaccggactcctccgcgggtattggcaaatcgggtgcacagcccgctaaaaagagactcaatttcggtcagactggcgacacagagtcagtcccagaccctcaaccaatcggagaacctcccgcagccccctcaggtgtgggatctcttacaatggcttcaggtggtggcgcaccagtggcagacaataacgaaggtgccgatggagtgggtagttcctcgggaaattggcattgcgattcccaatggctgggggacagagtcatcaccaccagcacccgaacctgggccctgcccacctacaacaatcacctctacaagcaaatctccaacagcacatctggaggatcttcaaatgacaacgcctacttcggctacagcaccccctgggggtattttgacttcaacagattccactgccacttctcaccacgtgactggcagcgactcatcaacaacaactggggattccggcctaagcgactcaacttcaagctcttcaacattcaggtcaaagaggttacggacaacaatggagtcaagaccatcgccaataaccttaccagcacggtccaggtcttcacggactcagactatcagctcccgtacgtgctcgggtcggctcacgagggctgcctcccgccgttcccagcggacgttttcatgattcctcagtacgggtatctgacgcttaatgatggaagccaggccgtgggtcgttcgtccttttactgcctggaatatttcccgtcgcaaatgctaagaacgggtaacaacttccagttcagctacgagtttgagaacgtacctttccatagcagctacgctcacagccaaagcctggaccgactaatgaatccactcatcgaccaatacttgtactatctctcaaagactattaacggttctggacagaatcaacaaacgctaaaattcagtgtggccggacccagcaacatggctgtccagggaagaaactacatacctggacccagctaccgacaacaacgtgtctcaaccactgtgactcaaaacaacaacagcgaatttgcttggcctggagcttcttcttgggctctcaatggacgtaatagcttgatgaatcctggacctgctatggccagccacaaagaaggagaggaccgtttctttcctttgtctggatctttaatttttggcaaacaaggaactggaagagacaacgtggatgcggacaaagtcatgataaccaacgaagaagaaattaaaactactaacccggtagcaacggagtcctatggacaagtggccacaaaccaccaggctgcccaagcacaggcgcagaccggctgggttcaaaaccaaggaatacttccgggtatggtttggcaggacagagatgtgtacctgcaaggacccatttgggccaaaattcctcacacggacggcaactttcacccttctccgctgatgggagggtttggaatgaagcacccgcctcctcagatcctcatcaaaaacacacctgtacctgcggatcctccaacggccttcaacaaggacaagctgaactctttcatcacccagtattctactggccaagtcagcgtggagatcgagtgggagctgcagaaggaaaacagcaagcgctggaacccggagatccagtacacttccaactattacaagtctaataatgttgaatttgctgttaatactgaaggtgtatatagtgaaccccgccccattggcaccagatacctgactcgtaatctg

SEQ ID NO: 80 - protein, 736 aa, synthetic construct
  REGION 1..736: note = Adeno Associated Virus Capsid Protein Variant
MAADGYLPDWLEDNLSEGIREWWALKPGAPQPKANQQHQDNARGLVLPGYKYLGPGNGLDKGEPVNAADAAALEHDKAYDQQLKAGDNPYLKYNHADAEFQERLKEDTSFGGNLGRAVFQAKKRLLEPLGLVEEAAKTAPGKKRPVEQSPQEPDSSAGIGKSGAQPAKKRLNFGQTGDTESVPDPQPIGEPPAAPSGVGSLTMASGGGAPVADNNEGADGVGSSSGNWHCDSQWLGDRVITTSTRTWALPTYNNHLYKQISNSTSGGSSNDNAYFGYSTPWGYFDFNRFHCHFSPRDWQRLINNNWGFRPKRLNFKLFNIQVKEVTDNNGVKTIANNLTSTVQVFTDSDYQLPYVLGSAHEGCLPPFPADVFMIPQYGYLTLNDGSQAVGRSSFYCLEYFPSQMLRTGNNFQFSYEFENVPFHSSYAHSQSLDRLMNPLIDQYLYYLSKTINGSGQNQQTLKFSVAGPSNMAVQGRNYIPGPSYRQQRVSTTVTQNNNSEFAWPGASSWALNGRNSLMNPGPAMASHKEGEDRFFPLSGSLIFGKQGTGRDNVDADKVMITNEEEIKTTNPVATESYGQVATNHQAAQAQAQTGWVQNQGILPGMVWQDRDVYLQGPIWAKIPHTDGNFHPSPLMGGFGMKHPPPQILIKNTPVPADPPTAFNKDKLNSFITQYSTGQVSVEIEWELQKENSKRWNPEIQYTSNYYKSNNVEFAVNTEGVYSEPRPIGTRYLTRNL

SEQ ID NO: 81 - DNA, 2208 bp, synthetic construct
  misc_feature 1..2208: note = Adeno Associated Virus Capsid Protein Variant
  source 1..2208: mol_type = other DNA
atggctgccgatggttatcttccagattggctcgaggacaaccttagtgaaggaattcgcgagtggtgggctttgaaacctggagcccctcaacccaaggcaaatcaacaacatcaagacaacgctcgaggtcttgtgcttccgggttacaaataccttggacccggcaacggactcgacaagggggagccggtcaacgcagcagacgcggcggccctcgagcacgacaaggcctacgaccagcagctcaaggccggagacaacccgtacctcaagtacaaccacgccgacgccgagttccaggagcggctcaaagaagatacgtcttttgggggcaacctcgggcgagcagtcttccaggccaaaaagaggcttcttgaacctcttggtctggttgaggaagcggctaagacggctcctggaaagaagaggcctgtagagcagtctcctcaggaaccggactcctccgcgggtattggcaaatcgggtgcacagcccgctaaaaagagactcaatttcggtcagactggcgacacagagtcagtcccagaccctcaaccaatcggagaacctcccgcagccccctcaggtgtgggatctcttacaatggcttcaggtggtggcgcaccagtggcagacaataacgaaggtgccgatggagtgggtagttcctcgggaaattggcattgcgattcccaatggctgggggacagagtcatcaccaccagcacccgaacctgggccctgcccacctacaacaatcacctctacaagcaaatctccaacagcacatctggaggatcttcaaatgacaacgcctacttcggctacagcaccccctgggggtattttgacttcaacagattccactgccacttctcaccacgtgactggcagcgactcatcaacaacaactggggattccggcctaagcgactcaacttcaagctcttcaacattcaggtcaaagaggttacggacaacaatggagtcaagaccatcgccaataaccttaccagcacggtccaggtcttcacggactcagactatcagctcccgtacgtgctcgggtcggctcacgagggctgcctcccgccgttcccagcggacgttttcatgattcctcagtacgggtatctgacgcttaatgatggaagccaggccgtgggtcgttcgtccttttactgcctggaatatttcccgtcgcaaatgctaagaacgggtaacaacttccagttcagctacgagtttgagaacgtacctttccatagcagctacgctcacagccaaagcctggaccgactaatgaatccactcatcgaccaatacttgtactatctctcaaagactattaacggttctggacagaatcaacaaacgctaaaattcagtgtggccggacccagcaacatggctgtccagggaagaaactacatacctggacccagctaccgacaacaacgtgtctcaaccactgtgactcaaaacaacaacggtgaatttgcttggcctggagcttcttcttgggctctcaatggacgtaatagcttgatgaatcctggacctgctatggccagccacaaagaaggagaggaccgtttctttcctttgtctggatctttaatttttggcaaacaaggaactggaagagacaacgtggatgcggacaaagtcatgataaccaacgaagaagaaattaaaactactaacccggtagcaacggagtcctatggacaagtggccacaaaccaccagagtgcccaagcacaggcgcagaccggctgggttcaaaaccaaggaatacttccgggtatggtttggcaggacagagatgtgtacctgcaaggacccatttgggccaaaattcctcacacggacggcaactttcacccttctccgctgatgggagggtttggaatgaagcacccgcctcctcagatcctcatcaaaaacacacctgtacctgcggatcctccaacggccttcaacaaggacaagctgaactctttcatcacccagtattctactggccaagtcagcgtggagatcgagtgggagctgcagaaggaaaacagcaagcgctggaacccggagatccagtacacttccaactattacaagtctaataatgttgaatttgctgttaatactgaaggtgtatatagtgaaccccgccccattggcaccagatacctgactcgtaatctg

SEQ ID NO: 82 - protein, 736 aa, synthetic construct
  REGION 1..736: note = Adeno Associated Virus Capsid Protein Variant
MAADGYLPDWLEDNLSEGIREWWALKPGAPQPKANQQHQDNARGLVLPGYKYLGPGNGLDKGEPVNAADAAALEHDKAYDQQLKAGDNPYLKYNHADAEFQERLKEDTSFGGNLGRAVFQAKKRLLEPLGLVEEAAKTAPGKKRPVEQSPQEPDSSAGIGKSGAQPAKKRLNFGQTGDTESVPDPQPIGEPPAAPSGVGSLTMASGGGAPVADNNEGADGVGSSSGNWHCDSQWLGDRVITTSTRTWALPTYNNHLYKQISNSTSGGSSNDNAYFGYSTPWGYFDFNRFHCHFSPRDWQRLINNNWGFRPKRLNFKLFNIQVKEVTDNNGVKTIANNLTSTVQVFTDSDYQLPYVLGSAHEGCLPPFPADVFMIPQYGYLTLNDGSQAVGRSSFYCLEYFPSQMLRTGNNFQFSYEFENVPFHSSYAHSQSLDRLMNPLIDQYLYYLSKTINGSGQNQQTLKFSVAGPSNMAVQGRNYIPGPSYRQQRVSTTVTQNNNGEFAWPGASSWALNGRNSLMNPGPAMASHKEGEDRFFPLSGSLIFGKQGTGRDNVDADKVMITNEEEIKTTNPVATESYGQVATNHQSAQAQAQTGWVQNQGILPGMVWQDRDVYLQGPIWAKIPHTDGNFHPSPLMGGFGMKHPPPQILIKNTPVPADPPTAFNKDKLNSFITQYSTGQVSVEIEWELQKENSKRWNPEIQYTSNYYKSNNVEFAVNTEGVYSEPRPIGTRYLTRNL

SEQ ID NO: 83 - DNA, 2208 bp, synthetic construct
  misc_feature 1..2208: note = Adeno Associated Virus Capsid Protein Variant
  source 1..2208: mol_type = other DNA
atggctgccgatggttatcttccagattggctcgaggacaaccttagtgaaggaattcgcgagtggtgggctttgaaacctggagcccctcaacccaaggcaaatcaacaacatcaagacaacgctcgaggtcttgtgcttccgggttacaaataccttggacccggcaacggactcgacaagggggagccggtcaacgcagcagacgcggcggccctcgagcacgacaaggcctacgaccagcagctcaaggccggagacaacccgtacctcaagtacaaccacgccgacgccgagttccaggagcggctcaaagaagatacgtcttttgggggcaacctcgggcgagcagtcttccaggccaaaaagaggcttcttgaacctcttggtctggttgaggaagcggctaagacggctcctggaaagaagaggcctgtagagcagtctcctcaggaaccggactcctccgcgggtattggcaaatcgggtgcacagcccgctaaaaagagactcaatttcggtcagactggcgacacagagtcagtcccagaccctcaaccaatcggagaacctcccgcagccccctcaggtgtgggatctcttacaatggcttcaggtggtggcgcaccagtggcagacaataacgaaggtgccgatggagtgggtagttcctcgggaaattggcattgcgattcccaatggctgggggacagagtcatcaccaccagcacccgaacctgggccctgcccacctacaacaatcacctctacaagcaaatctccaacagcacatctggaggatcttcaaatgacaacgcctacttcggctacagcaccccctgggggtattttgacttcaacagattccactgccacttctcaccacgtgactggcagcgactcatcaacaacaactggggattccggcctaagcgactcaacttcaagctcttcaacattcaggtcaaagaggttacggacaacaatggagtcaagaccatcgccaataaccttaccagcacggtccaggtcttcacggactcagactatcagctcccgtacgtgctcgggtcggctcacgagggctgcctcccgccgttcccagcggacgttttcatgattcctcagtacgggtatctgacgcttaatgatggaagccaggccgtgggtcgttcgtccttttactgcctggaatatttcccgtcgcaaatgctaagaacgggtaacaacttccagttcagctacgagtttgagaacgtacctttccatagcagctacgctcacagccaaagcctggaccgactaatgaatccactcatcgaccaatacttgtactatctctcaaagactattaacggttctggacagaatcaacaaacgctaaaattcagtgtggccggacccagcaacatggctgtccagggaagaaactacatacctggacccagctaccgacaacaacgtgtctcaaccactgtgactcaaaacaacaacagcgaatttgcttggcctggagcttcttcttgggctctcaatggacgtaatagcttgatgaatcctggacctgctatggccagccacaaagtgggagaggaccgtttctttcctttgtctggatctttaatttttggcaaacaaggaactggaagagacaacgtggatgcggacaaagtcatgataaccaacgaagaagaaattaaaactactaacccggtagcaacggagtcctatggacaagtggccacaaaccaccagagtgcccaagcacaggcgcagaccggctgggttcaaaaccaaggaatacttccgggtatggtttggcaggacagagatgtgtacctgcaaggacccatttgggccaaaattcctcacacggacggcaactttcacccttctccgctgatgggagggtttggaatgaagcacccgcctcctcagatcctcatcaaaaacacacctgtacctgcggatcctccaacggccttcaacaaggacaagctgaactctttcatcacccagtattctactggccaagtcagcgtggagatcgagtgggagctgcagaaggaaaacagcaagcgctggaacccggagatccagtacacttccaactattacaagtctaataatgttgaatttgctgttaatactgaaggtgtatatagtgaaccccgccccattggcaccagatacctgactcgtaatctg

SEQ ID NO: 84 - protein, 736 aa, synthetic construct
  REGION 1..736: note = Adeno Associated Virus Capsid Protein Variant
MAADGYLPDWLEDNLSEGIREWWALKPGAPQPKANQQHQDNARGLVLPGYKYLGPGNGLDKGEPVNAADAAALEHDKAYDQQLKAGDNPYLKYNHADAEFQERLKEDTSFGGNLGRAVFQAKKRLLEPLGLVEEAAKTAPGKKRPVEQSPQEPDSSAGIGKSGAQPAKKRLNFGQTGDTESVPDPQPIGEPPAAPSGVGSLTMASGGGAPVADNNEGADGVGSSSGNWHCDSQWLGDRVITTSTRTWALPTYNNHLYKQISNSTSGGSSNDNAYFGYSTPWGYFDFNRFHCHFSPRDWQRLINNNWGFRPKRLNFKLFNIQVKEVTDNNGVKTIANNLTSTVQVFTDSDYQLPYVLGSAHEGCLPPFPADVFMIPQYGYLTLNDGSQAVGRSSFYCLEYFPSQMLRTGNNFQFSYEFENVPFHSSYAHSQSLDRLMNPLIDQYLYYLSKTINGSGQNQQTLKFSVAGPSNMAVQGRNYIPGPSYRQQRVSTTVTQNNNSEFAWPGASSWALNGRNSLMNPGPAMASHKVGEDRFFPLSGSLIFGKQGTGRDNVDADKVMITNEEEIKTTNPVATESYGQVATNHQSAQAQAQTGWVQNQGILPGMVWQDRDVYLQGPIWAKIPHTDGNFHPSPLMGGFGMKHPPPQILIKNTPVPADPPTAFNKDKLNSFITQYSTGQVSVEIEWELQKENSKRWNPEIQYTSNYYKSNNVEFAVNTEGVYSEPRPIGTRYLTRNL

SEQ ID NO: 85 - DNA, 2208 bp, synthetic construct
  misc_feature 1..2208: note = Adeno Associated Virus Capsid Protein Variant
  source 1..2208: mol_type = other DNA
atggctgccgatggttatcttccagattggctcgaggacaaccttagtgaaggaattcgcgagtggtgggctttgaaacctggagcccctcaacccaaggcaaatcaacaacatcaagacaacgctcgaggtcttgtgcttccgggttacaaataccttggacccggcaacggactcgacaagggggagccggtcaacgcagcagacgcggcggccctcgagcacgacaaggcctacgaccagcagctcaaggccggagacaacccgtacctcaagtacaaccacgccgacgccgagttccaggagcggctcaaagaagatacgtcttttgggggcaacctcgggcgagcagtcttccaggccaaaaagaggcttcttgaacctcttggtctggttgaggaagcggctaagacggctcctggaaagaagaggcctgtagagcagtctcctcaggaaccggactcctccgcgggtattggcaaatcgggtgcacagcccgctaaaaagagactcaatttcggtcagactggcgacacagagtcagtcccagaccctcaaccaatcggagaacctcccgcagccccctcaggtgtgggatctcttacaatggcttcaggtggtggcgcaccagtggcagacaataacgaaggtgccgatggagtgggtagttcctcgggaaattggcattgcgattcccaatggctgggggacagagtcatcaccaccagcacccgaacctgggccctgcccacctacaacaatcacctctacaagcaaatctccaacagcacatctggaggatcttcaaatgacaacgcctacttcggctacagcaccccctgggggtattttgacttcaacagattccactgccacttctcaccacgtgactggcagcgactcatcaacaacaactggggattccggcctaagcgactcaacttcaagctcttcaacattcaggtcaaagaggttacggacaacaatggagtcaagaccatcgccaataaccttaccagcacggtccaggtcttcacggactcagactatcagctcccgtacgtgctcgggtcggctcacgagggctgcctcccgccgttcccagcggacgttttcatgattcctcagtacgggtatctgacgcttaatgatggaagccaggccgtgggtcgttcgtccttttactgcctggaatatttcccgtcgcaaatgctaagaacgggtaacaacttccagttcagctacgagtttgagaacgtacctttccatagcagctacgctcacagccaaagcctggaccgactaatgaatccactcatcgaccaatacttgtactatctctcaaagactattaacggttctggacagaatcaacaaacgctaaaattcagtgtggccggacccagcaacatggctgtccagggaagaaactacatacctggacccagctaccgacaacaacgtgtctcaaccactgtgactcaaaacaacaacagcgaatttgcttggcctggagcttcttcttgggctctcaatggacgtaatagcttgatgaatcctggacctgctatggccagccacaaagaaggagaggaccgtttctttcctttgtctggatctttaatttttggcaaacaaggaactggaagagacaacgtggatgcggacaaagtcatgataaccaacgaagaagaaattaaaactactaacccggtagcaacggagtcctatggacaagtggccacaaaccaccagagggcccaagcacaggcgcagaccggctgggttcaaaaccaaggaatacttccgggtatggtttggcaggacagagatgtgtacctgcaaggacccatttgggccaaaattcctcacacggacggcaactttcacccttctccgctgatgggagggtttggaatgaagcacccgcctcctcagatcctcatcaaaaacacacctgtacctgcggatcctccaacggccttcaacaaggacaagctgaactctttcatcacccagtattctactggccaagtcagcgtggagatcgagtgggagctgcagaaggaaaacagcaagcgctggaacccggagatccagtacacttccaactattacaagtctaataatgttgaatttgctgttaatactgaaggtgtatatagtgaaccccgccccattggcaccagatacctgactcgtaatctg

SEQ ID NO: 86 - protein, 736 aa, synthetic construct
  REGION 1..736: note = Adeno Associated Virus Capsid Protein Variant
MAADGYLPDWLEDNLSEGIREWWALKPGAPQPKANQQHQDNARGLVLPGYKYLGPGNGLDKGEPVNAADAAALEHDKAYDQQLKAGDNPYLKYNHADAEFQERLKEDTSFGGNLGRAVFQAKKRLLEPLGLVEEAAKTAPGKKRPVEQSPQEPDSSAGIGKSGAQPAKKRLNFGQTGDTESVPDPQPIGEPPAAPSGVGSLTMASGGGAPVADNNEGADGVGSSSGNWHCDSQWLGDRVITTSTRTWALPTYNNHLYKQISNSTSGGSSNDNAYFGYSTPWGYFDFNRFHCHFSPRDWQRLINNNWGFRPKRLNFKLFNIQVKEVTDNNGVKTIANNLTSTVQVFTDSDYQLPYVLGSAHEGCLPPFPADVFMIPQYGYLTLNDGSQAVGRSSFYCLEYFPSQMLRTGNNFQFSYEFENVPFHSSYAHSQSLDRLMNPLIDQYLYYLSKTINGSGQNQQTLKFSVAGPSNMAVQGRNYIPGPSYRQQRVSTTVTQNNNSEFAWPGASSWALNGRNSLMNPGPAMASHKEGEDRFFPLSGSLIFGKQGTGRDNVDADKVMITNEEEIKTTNPVATESYGQVATNHQRAQAQAQTGWVQNQGILPGMVWQDRDVYLQGPIWAKIPHTDGNFHPSPLMGGFGMKHPPPQILIKNTPVPADPPTAFNKDKLNSFITQYSTGQVSVEIEWELQKENSKRWNPEIQYTSNYYKSNNVEFAVNTEGVYSEPRPIGTRYLTRNL

SEQ ID NO: 87 - DNA, 2208 bp, synthetic construct
  misc_feature 1..2208: note = Adeno Associated Virus Capsid Protein Variant
  source 1..2208: mol_type = other DNA
atggctgccgatggttatcttccagattggctcgaggacaaccttagtgaaggaattcgcgagtggtgggctttgaaacctggagcccctcaacccaaggcaaatcaacaacatcaagacaacgctcgaggtcttgtgcttccgggttacaaataccttggacccggcaacggactcgacaagggggagccggtcaacgcagcagacgcggcggccctcgagcacgacaaggcctacgaccagcagctcaaggccggagacaacccgtacctcaagtacaaccacgccgacgccgagttccaggagcggctcaaagaagatacgtcttttgggggcaacctcgggcgagcagtcttccaggccaaaaagaggcttcttgaacctcttggtctggttgaggaagcggctaagacggctcctggaaagaagaggcctgtagagcagtctcctcaggaaccggactcctccgcgggtattggcaaatcgggtgcacagcccgctaaaaagagactcaatttcggtcagactggcgacacagagtcagtcccagaccctcaaccaatcggagaacctcccgcagccccctcaggtgtgggatctcttacaatggcttcaggtggtggcgcaccagtggcagacaataacgaaggtgccgatggagtgggtagttcctcgggaaattggcattgcgattcccaatggctgggggacagagtcatcaccaccagcacccgaacctgggccctgcccacctacaacaatcacctctacaagcaaatctccaacagcacatctggaggatcttcaaatgacaacgcctacttcggctacagcaccccctgggggtattttgacttcaacagattccactgccacttctcaccacgtgactggcagcgactcatcaacaacaactggggattccggcctaagcgactcaacttcaagctcttcaacattcaggtcaaagaggttacggacaacaatggagtcaagaccatcgccaataaccttaccagcacggtccaggtcttcacggactcagactatcagctcccgtacgtgctcgggtcggctcacgagggctgcctcccgccgttcccagcggacgttttcatgattcctcagtacgggtatctgacgcttaatgatggaagccaggccgtgggtcgttcgtccttttactgcctggaatatttcccgtcgcaaatgctaagaacgggtaacaacttccagttcagctacgagtttgagaacgtacctttccatagcagctacgctcacagccaaagcctggaccgactaatgaatccactcatcgaccaatacttgtactatctctcaaagactattaacggttctggacagaatcaacaaacgctaaaattcagtgtggccggacccagcaacatggctgtccagggaagaaactacatacctggacccagctaccgacaacaacgtgtctcaaccactgtgactcaaaacaacaacagcgaatttgcttggcctggagcttcttcttgggctctcaatggacgtaatagcttgatgaatcctggacctgctatggccagccacaaagaaggagaggaccgtttctttcctttgtctggatctttaatttttggcaaacaaggaactggaagagacaacgtggatgcggacaaagtcatgataaccaacgaagaagaaattaaaactactaacccggtagcaacggagtcctatggacaagtggccacaaaccaccagagtgcccaagcacaggcgcagaccggctgggttcaaaaccaaggaatacttccgggtatggtttggcaggacagagatgtgtacctgcaaggacccatttgggccaaaattcctcacacggacggcaactttcacccttctccgctgatgggagggtttggaatgaagcacccgcctcctcagatcctcatcaaaaacacacctgtacctgcggatcctccaacggccttcaacaagatgaagctgaactctttcatcacccagtattctactggccaagtcagcgtggagatcgagtgggagctgcagaaggaaaacagcaagcgctggaacccggagatccagtacacttccaactattacaagtctaataatgttgaatttgctgttaatactgaaggtgtatatagtgaaccccgccccattggcaccagatacctgactcgtaatctg

SEQ ID NO: 88 - protein, 736 aa, synthetic construct
  REGION 1..736: note = Adeno Associated Virus Capsid Protein Variant
MAADGYLPDWLEDNLSEGIREWWALKPGAPQPKANQQHQDNARGLVLPGYKYLGPGNGLDKGEPVNAADAAALEHDKAYDQQLKAGDNPYLKYNHADAEFQERLKEDTSFGGNLGRAVFQAKKRLLEPLGLVEEAAKTAPGKKRPVEQSPQEPDSSAGIGKSGAQPAKKRLNFGQTGDTESVPDPQPIGEPPAAPSGVGSLTMASGGGAPVADNNEGADGVGSSSGNWHCDSQWLGDRVITTSTRTWALPTYNNHLYKQISNSTSGGSSNDNAYFGYSTPWGYFDFNRFHCHFSPRDWQRLINNNWGFRPKRLNFKLFNIQVKEVTDNNGVKTIANNLTSTVQVFTDSDYQLPYVLGSAHEGCLPPFPADVFMIPQYGYLTLNDGSQAVGRSSFYCLEYFPSQMLRTGNNFQFSYEFENVPFHSSYAHSQSLDRLMNPLIDQYLYYLSKTINGSGQNQQTLKFSVAGPSNMAVQGRNYIPGPSYRQQRVSTTVTQNNNSEFAWPGASSWALNGRNSLMNPGPAMASHKEGEDRFFPLSGSLIFGKQGTGRDNVDADKVMITNEEEIKTTNPVATESYGQVATNHQSAQAQAQTGWVQNQGILPGMVWQDRDVYLQGPIWAKIPHTDGNFHPSPLMGGFGMKHPPPQILIKNTPVPADPPTAFNKMKLNSFITQYSTGQVSVEIEWELQKENSKRWNPEIQYTSNYYKSNNVEFAVNTEGVYSEPRPIGTRYLTRNL

SEQ ID NO: 89 - DNA, 2208 bp, synthetic construct
  misc_feature 1..2208: note = Adeno Associated Virus Capsid Protein Variant
  source 1..2208: mol_type = other DNA
atggctgccgatggttatcttccagattggctcgaggacaaccttagtgaaggaattcgcgagtggtgggctttgaaacctggagcccctcaacccaaggcaaatcaacaacatcaagacaacgctcgaggtcttgtgcttccgggttacaaataccttggacccggcaacggactcgacaagggggagccggtcaacgcagcagacgcggcggccctcgagcacgacaaggcctacgaccagcagctcaaggccggagacaacccgtacctcaagtacaaccacgccgacgccgagttccaggagcggctcaaagaagatacgtcttttgggggcaacctcgggcgagcagtcttccaggccaaaaagaggcttcttgaacctcttggtctggttgaggaagcggctaagacggctcctggaaagaagaggcctgtagagcagtctcctcaggaaccggactcctccgcgggtattggcaaatcgggtgcacagcccgctaaaaagagactcaatttcggtcagactggcgacacagagtcagtcccagaccctcaaccaatcggagaacctcccgcagccccctcaggtgtgggatctcttacaatggcttcaggtggtggcgcaccagtggcagacaataacgaaggtgccgatggagtgggtagttcctcgggaaattggcattgcgattcccaatggctgggggacagagtcatcaccaccagcacccgaacctgggccctgcccacctacaacaatcacctctacaagcaaatctccaacagcacatctggaggatcttcaaatgacaacgcctacttcggctacagcaccccctgggggtattttgacttcaacagattccactgccacttctcaccacgtgactggcagcgactcatcaacaacaactggggattccggcctaagcgactcaacttcaagctcttcaacattcaggtcaaagaggttacggacaacaatggagtcaagaccatcgccaataaccttaccagcacggtccaggtcttcacggactcagactatcagctcccgtacgtgctcgggtcggctcacgagggctgcctcccgccgttcccagcggacgttttcatgattcctcagtacgggtatctgacgcttaatgatggaagccaggccgtgggtcgttcgtccttttactgcctggaatatttcccgtcgcaaatgctaagaacgggtaacaacttccagttcagctacgagtttgagaacgtacctttccatagcagctacgctcacagccaaagcctggaccgactaatgaatccactcatcgaccaatacttgtactatctctcaaagactattaacggttctggacagaatcaacaaacgctaaaattcagtgtggccggacccagcaacatggctgtccagggaagaaactacatacctggacccagctaccgacaacaacgtgtctcaaccactgtgactcaaaacaacaacagcgaatttgcttggcctggagcttcttcttgggctctcaatggacgtaatagcttgatgaatcctggacctgctatggccagccacaaagaaggagaggaccgtttctttcctttgtctggatctttaatttttggcaaacaaggaactggaagagacaacgtggatgcggacaaagtcatgataaccaacgaagaagaaattaaaactactaacccggtagcaacggagtcctatggacaagtggccacaaaccaccagagtgcccaagcacaggcgcagaccggctgggttcaaaaccaaggaatacttccgggtatggtttggcaggacagagatgtgtacctgcaaggacccatttgggccaaaattcctcacacggacggcaactttcacccttctccgctgatgggagggtttggaatgaagcacccgcctcctcagatcctcatcaaaaacacacctgtacctgcggatcctccaacggccttcaacaaggacccgctgaactctttcatcacccagtattctactggccaagtcagcgtggagatcgagtgggagctgcagaaggaaaacagcaagcgctggaacccggagatccagtacacttccaactattacaagtctaataatgttgaatttgctgttaatactgaaggtgtatatagtgaaccccgccccattggcaccagatacctgactcgtaatctg

SEQ ID NO: 90 - protein, 736 aa, synthetic construct
  REGION 1..736: note = Adeno Associated Virus Capsid Protein Variant
MAADGYLPDWLEDNLSEGIREWWALKPGAPQPKANQQHQDNARGLVLPGYKYLGPGNGLDKGEPVNAADAAALEHDKAYDQQLKAGDNPYLKYNHADAEFQERLKEDTSFGGNLGRAVFQAKKRLLEPLGLVEEAAKTAPGKKRPVEQSPQEPDSSAGIGKSGAQPAKKRLNFGQTGDTESVPDPQPIGEPPAAPSGVGSLTMASGGGAPVADNNEGADGVGSSSGNWHCDSQWLGDRVITTSTRTWALPTYNNHLYKQISNSTSGGSSNDNAYFGYSTPWGYFDFNRFHCHFSPRDWQRLINNNWGFRPKRLNFKLFNIQVKEVTDNNGVKTIANNLTSTVQVFTDSDYQLPYVLGSAHEGCLPPFPADVFMIPQYGYLTLNDGSQAVGRSSFYCLEYFPSQMLRTGNNFQFSYEFENVPFHSSYAHSQSLDRLMNPLIDQYLYYLSKTINGSGQNQQTLKFSVAGPSNMAVQGRNYIPGPSYRQQRVSTTVTQNNNSEFAWPGASSWALNGRNSLMNPGPAMASHKEGEDRFFPLSGSLIFGKQGTGRDNVDADKVMITNEEEIKTTNPVATESYGQVATNHQSAQAQAQTGWVQNQGILPGMVWQDRDVYLQGPIWAKIPHTDGNFHPSPLMGGFGMKHPPPQILIKNTPVPADPPTAFNKDPLNSFITQYSTGQVSVEIEWELQKENSKRWNPEIQYTSNYYKSNNVEFAVNTEGVYSEPRPIGTRYLTRNL

SEQ ID NO: 91 - DNA, 2208 bp, synthetic construct
  misc_feature 1..2208: note = Adeno Associated Virus Capsid Protein Variant
  source 1..2208: mol_type = other DNA
atggctgccgatggttatcttccagattggctcgaggacaaccttagtgaaggaattcgcgagtggtgggctttgaaacctggagcccctcaacccaaggcaaatcaacaacatcaagacaacgctcgaggtcttgtgcttccgggttacaaataccttggacccggcaacggactcgacaagggggagccggtcaacgcagcagacgcggcggccctcgagcacgacaaggcctacgaccagcagctcaaggccggagacaacccgtacctcaagtacaaccacgccgacgccgagttccaggagcggctcaaagaagatacgtcttttgggggcaacctcgggcgagcagtcttccaggccaaaaagaggcttcttgaacctcttggtctggttgaggaagcggctaagacggctcctggaaagaagaggcctgtagagcagtctcctcaggaaccggactcctccgcgggtattggcaaatcgggtgcacagcccgctaaaaagagactcaatttcggtcagactggcgacacagagtcagtcccagaccctcaaccaatcggagaacctcccgcagccccctcaggtgtgggatctcttacaatggcttcaggtggtggcgcaccagtggcagacaataacgaaggtgccgatggagtgggtagttcctcgggaaattggcattgcgattcccaatggctgggggacagagtcatcaccaccagcacccgaacctgggccctgcccacctacaacaatcacctctacaagcaaatctccaacagcacatctggaggatcttcaaatgacaacgcctacttcggctacagcaccccctgggggtattttgacttcaacagattccactgccacttctcaccacgtgactggcagcgactcatcaacaacaactggggattccggcctaagcgactcaacttcaagctcttcaacattcaggtcaaagaggttacggacaacaatggagtcaagaccatcgccaataaccttaccagcacggtccaggtcttcacggactcagactatcagctcccgtacgtgctcgggtcggctcacgagggctgcctcccgccgttcccagcggacgttttcatgattcctcagtacgggtatctgacgcttaatgatggaagccaggccgtgggtcgttcgtccttttactgcctggaatatttcccgtcgcaaatgctaagaacgggtaacaacttccagttcagctacgagtttgagaacgtacctttccatagcagctacgctcacagccaaagcctggaccgactaatgaatccactcatcgaccaatacttgtactatctctcaaagactattaacggttctggacagaatcaacaaacgctaaaattcagtgtggccggacccagcaacatggctgtccagggaagaaactacatacctggacccagctaccgacaacaacgtgtctcaaccactgtgactcaaaaccgtaacagcgaatttgcttggcctggagcttcttcttgggctctcaatggacgtaatagcttgatgaatcctggacctgctatggccagccacaaagaaggagaggaccgtttctttcctttgtctggatctttaatttttggcaaacaaggaactggaagagacaacgtggatgcggacaaagtcatgataaccaacgaagaagaaattaaaactactaacccggtagcaacggagtcctatggacaagtggccacaaaccaccagagtgcccaagcacaggcgcagaccggctgggttcaaaaccaaggaatacttccgggtatggtttggcaggacagagatgtgtacctgcaaggacccatttgggccaaaattcctcacacggacggcaactttcacccttctccgctgatgggagggtttggaatgaagcacccgcctcctcagatcctcatcaaaaacacacctgtacctgcggatcctccaacggccttcaacaaggacaagctgaactctttcatcacccagtattctactggccaagtcagcgtggagatcgagtgggagctgcagaaggaaaacagcaagcgctggaacccggagatccagtacacttccaactattacaagtctaataatgttgaatttgctgttaatactgaaggtgtatatagtgaaccccgccccattggcaccagatacctgactcgtaatctg

SEQ ID NO: 92 - protein, 736 aa, synthetic construct
  REGION 1..736: note = Adeno Associated Virus Capsid Protein Variant
MAADGYLPDWLEDNLSEGIREWWALKPGAPQPKANQQHQDNARGLVLPGYKYLGPGNGLDKGEPVNAADAAALEHDKAYDQQLKAGDNPYLKYNHADAEFQERLKEDTSFGGNLGRAVFQAKKRLLEPLGLVEEAAKTAPGKKRPVEQSPQEPDSSAGIGKSGAQPAKKRLNFGQTGDTESVPDPQPIGEPPAAPSGVGSLTMASGGGAPVADNNEGADGVGSSSGNWHCDSQWLGDRVITTSTRTWALPTYNNHLYKQISNSTSGGSSNDNAYFGYSTPWGYFDFNRFHCHFSPRDWQRLINNNWGFRPKRLNFKLFNIQVKEVTDNNGVKTIANNLTSTVQVFTDSDYQLPYVLGSAHEGCLPPFPADVFMIPQYGYLTLNDGSQAVGRSSFYCLEYFPSQMLRTGNNFQFSYEFENVPFHSSYAHSQSLDRLMNPLIDQYLYYLSKTINGSGQNQQTLKFSVAGPSNMAVQGRNYIPGPSYRQQRVSTTVTQNRNSEFAWPGASSWALNGRNSLMNPGPAMASHKEGEDRFFPLSGSLIFGKQGTGRDNVDADKVMITNEEEIKTTNPVATESYGQVATNHQSAQAQAQTGWVQNQGILPGMVWQDRDVYLQGPIWAKIPHTDGNFHPSPLMGGFGMKHPPPQILIKNTPVPADPPTAFNKDKLNSFITQYSTGQVSVEIEWELQKENSKRWNPEIQYTSNYYKSNNVEFAVNTEGVYSEPRPIGTRYLTRNL

SEQ ID NO: 93 - DNA, 2208 bp, synthetic construct
  misc_feature 1..2208: note = Adeno Associated Virus Capsid Protein Variant
  source 1..2208: mol_type = other DNA
atggctgccgatggttatcttccagattggctcgaggacaaccttagtgaaggaattcgcgagtggtgggctttgaaacctggagcccctcaacccaaggcaaatcaacaacatcaagacaacgctcgaggtcttgtgcttccgggttacaaataccttggacccggcaacggactcgacaagggggagccggtcaacgcagcagacgcggcggccctcgagcacgacaaggcctacgaccagcagctcaaggccggagacaacccgtacctcaagtacaaccacgccgacgccgagttccaggagcggctcaaagaagatacgtcttttgggggcaacctcgggcgagcagtcttccaggccaaaaagaggcttcttgaacctcttggtctggttgaggaagcggctaagacggctcctggaaagaagaggcctgtagagcagtctcctcaggaaccggactcctccgcgggtattggcaaatcgggtgcacagcccgctaaaaagagactcaatttcggtcagactggcgacacagagtcagtcccagaccctcaaccaatcggagaacctcccgcagccccctcaggtgtgggatctcttacaatggcttcaggtggtggcgcaccagtggcagacaataacgaaggtgccgatggagtgggtagttcctcgggaaattggcattgcgattcccaatggctgggggacagagtcatcaccaccagcacccgaacctgggccctgcccacctacaacaatcacctctacaagcaaatctccaacagcacatctggaggatcttcaaatgacaacgcctacttcggctacagcaccccctgggggtattttgacttcaacagattccactgccacttctcaccacgtgactggcagcgactcatcaacaacaactggggattccggcctaagcgactcaacttcaagctcttcaacattcaggtcaaagaggttacggacaacaatggagtcaagaccatcgccaataaccttaccagcacggtccaggtcttcacggactcagactatcagctcccgtacgtgctcgggtcggctcacgagggctgcctcccgccgttcccagcggacgttttcatgattcctcagtacgggtatctgacgcttaatgatggaagccaggccgtgggtcgttcgtccttttactgcctggaatatttcccgtcgcaaatgctaagaacgggtaacaacttccagttcagctacgagtttgagaacgtacctttccatagcagctacgctcacagccaaagcctggaccgactaatgaatccactcatcgaccaatacttgtactatctctcaaagactattaacggttctggacagaatcaacaaacgctaaaattcagtgtggccggacccagcaacatggctgtccagggaagaaactacatacctggacccagctaccgacaacaacgtgtctcaaccactgtgactcaaaacaacaacagcgaatttgcttggcctggagcttcttcttgggctctcaatggacgtaatagcttgatgaatcctggacctgctatggccagccacaaagaaggagaggaccgtttctttcctttgtctggatctttaatttttggcaaacaaggaaggggaagagacaacgtggatgcggacaaagtcatgataaccaacgaagaagaaattaaaactactaacccggtagcaacggagtcctatggacaagtggccacaaaccaccagagtgcccaagcacaggcgcagaccggctgggttcaaaaccaaggaatacttccgggtatggtttggcaggacagagatgtgtacctgcaaggacccatttgggccaaaattcctcacacggacggcaactttcacccttctccgctgatgggagggtttggaatgaagcacccgcctcctcagatcctcatcaaaaacacacctgtacctgcggatcctccaacggccttcaacaaggacaagctgaactctttcatcacccagtattctactggccaagtcagcgtggagatcgagtgggagctgcagaaggaaaacagcaagcgctggaacccggagatccagtacacttccaactattacaagtctaataatgttgaatttgctgttaatactgaaggtgtatatagtgaaccccgccccattggcaccagatacctgactcgtaatctg

SEQ ID NO: 94 - protein, 736 aa, synthetic construct
  REGION 1..736: note = Adeno Associated Virus Capsid Protein Variant
MAADGYLPDWLEDNLSEGIREWWALKPGAPQPKANQQHQDNARGLVLPGYKYLGPGNGLDKGEPVNAADAAALEHDKAYDQQLKAGDNPYLKYNHADAEFQERLKEDTSFGGNLGRAVFQAKKRLLEPLGLVEEAAKTAPGKKRPVEQSPQEPDSSAGIGKSGAQPAKKRLNFGQTGDTESVPDPQPIGEPPAAPSGVGSLTMASGGGAPVADNNEGADGVGSSSGNWHCDSQWLGDRVITTSTRTWALPTYNNHLYKQISNSTSGGSSNDNAYFGYSTPWGYFDFNRFHCHFSPRDWQRLINNNWGFRPKRLNFKLFNIQVKEVTDNNGVKTIANNLTSTVQVFTDSDYQLPYVLGSAHEGCLPPFPADVFMIPQYGYLTLNDGSQAVGRSSFYCLEYFPSQMLRTGNNFQFSYEFENVPFHSSYAHSQSLDRLMNPLIDQYLYYLSKTINGSGQNQQTLKFSVAGPSNMAVQGRNYIPGPSYRQQRVSTTVTQNNNSEFAWPGASSWALNGRNSLMNPGPAMASHKEGEDRFFPLSGSLIFGKQGRGRDNVDADKVMITNEEEIKTTNPVATESYGQVATNHQSAQAQAQTGWVQNQGILPGMVWQDRDVYLQGPIWAKIPHTDGNFHPSPLMGGFGMKHPPPQILIKNTPVPADPPTAFNKDKLNSFITQYSTGQVSVEIEWELQKENSKRWNPEIQYTSNYYKSNNVEFAVNTEGVYSEPRPIGTRYLTRNL

SEQ ID NO: 95 - DNA, 2208 bp, synthetic construct
  misc_feature 1..2208: note = Adeno Associated Virus Capsid Protein Variant
  source 1..2208: mol_type = other DNA
atggctgccgatggttatcttccagattggctcgaggacaaccttagtgaaggaattcgcgagtggtgggctttgaaacctggagcccctcaacccaaggcaaatcaacaacatcaagacaacgctcgaggtcttgtgcttccgggttacaaataccttggacccggcaacggactcgacaagggggagccggtcaacgcagcagacgcggcggccctcgagcacgacaaggcctacgaccagcagctcaaggccggagacaacccgtacctcaagtacaaccacgccgacgccgagttccaggagcggctcaaagaagatacgtcttttgggggcaacctcgggcgagcagtcttccaggccaaaaagaggcttcttgaacctcttggtctggttgaggaagcggctaagacggctcctggaaagaagaggcctgtagagcagtctcctcaggaaccggactcctccgcgggtattggcaaatcgggtgcacagcccgctaaaaagagactcaatttcggtcagactggcgacacagagtcagtcccagaccctcaaccaatcggagaacctcccgcagccccctcaggtgtgggatctcttacaatggcttcaggtggtggcgcaccagtggcagacaataacgaaggtgccgatggagtgggtagttcctcgggaaattggcattgcgattcccaatggctgggggacagagtcatcaccaccagcacccgaacctgggccctgcccacctacaacaatcacctctacaagcaaatctccaacagcacatctggaggatcttcaaatgacaacgcctacttcggctacagcaccccctgggggtattttgacttcaacagattccactgccacttctcaccacgtgactggcagcgactcatcaacaacaactggggattccggcctaagcgactcaacttcaagctcttcaacattcaggtcaaagaggttacggacaacaatggagtcaagaccatcgccaataaccttaccagcacggtccaggtcttcacggactcagactatcagctcccgtacgtgctcgggtcggctcacgagggctgcctcccgccgttcccagcggacgttttcatgattcctcagtacgggtatctgacgcttaatgatggaagccaggccgtgggtcgttcgtccttttactgcctggaatatttcccgtcgcaaatgctaagaacgggtaacaacttccagttcagctacgagtttgagaacgtacctttccatagcagctacgctcacagccaaagcctggaccgactaatgaatccactcatcgaccaatacttgtactatctctcaaagactattaacggttctggacagaatcaacaaacgctaaaattcagtgtggccggacccagcaacatggctgtccagggaagaaactacatacctggacccagctaccgacaacaacgtgtctcaaccactgtgactcaaaacaacaacagcgaatttgcttggcctggagcttcttcttgggctctcaatggacgtaatagcttgatgaatcctggacctgctatggccagccacaaagaaggagaggaccgtttctttcctttgtctggatctttaatttttggcaaacaaggaactggaagagacagggtggatgcggacaaagtcatgataaccaacgaagaagaaattaaaactactaacccggtagcaacggagtcctatggacaagtggccacaaaccaccagagtgcccaagcacaggcgcagaccggctgggttcaaaaccaaggaatacttccgggtatggtttggcaggacagagatgtgtacctgcaaggacccatttgggccaaaattcctcacacggacggcaactttcacccttctccgctgatgggagggtttggaatgaagcacccgcctcctcagatcctcatcaaaaacacacctgtacctgcggatcctccaacggccttcaacaaggacaagctgaactctttcatcacccagtattctactggccaagtcagcgtggagatcgagtgggagctgcagaaggaaaacagcaagcgctggaacccggagatccagtacacttccaactattacaagtctaataatgttgaatttgctgttaatactgaaggtgtatatagtgaaccccgccccattggcaccagatacctgactcgtaatctg

SEQ ID NO: 96 - protein, 736 aa, synthetic construct
  REGION 1..736: note = Adeno Associated Virus Capsid Protein Variant
MAADGYLPDWLEDNLSEGIREWWALKPGAPQPKANQQHQDNARGLVLPGYKYLGPGNGLDKGEPVNAADAAALEHDKAYDQQLKAGDNPYLKYNHADAEFQERLKEDTSFGGNLGRAVFQAKKRLLEPLGLVEEAAKTAPGKKRPVEQSPQEPDSSAGIGKSGAQPAKKRLNFGQTGDTESVPDPQPIGEPPAAPSGVGSLTMASGGGAPVADNNEGADGVGSSSGNWHCDSQWLGDRVITTSTRTWALPTYNNHLYKQISNSTSGGSSNDNAYFGYSTPWGYFDFNRFHCHFSPRDWQRLINNNWGFRPKRLNFKLFNIQVKEVTDNNGVKTIANNLTSTVQVFTDSDYQLPYVLGSAHEGCLPPFPADVFMIPQYGYLTLNDGSQAVGRSSFYCLEYFPSQMLRTGNNFQFSYEFENVPFHSSYAHSQSLDRLMNPLIDQYLYYLSKTINGSGQNQQTLKFSVAGPSNMAVQGRNYIPGPSYRQQRVSTTVTQNNNSEFAWPGASSWALNGRNSLMNPGPAMASHKEGEDRFFPLSGSLIFGKQGTGRDRVDADKVMITNEEEIKTTNPVATESYGQVATNHQSAQAQAQTGWVQNQGILPGMVWQDRDVYLQGPIWAKIPHTDGNFHPSPLMGGFGMKHPPPQILIKNTPVPADPPTAFNKDKLNSFITQYSTGQVSVEIEWELQKENSKRWNPEIQYTSNYYKSNNVEFAVNTEGVYSEPRPIGTRYLTRNL

SEQ ID NO: 97 - DNA, 2208 bp, synthetic construct
  misc_feature 1..2208: note = Adeno Associated Virus Capsid Protein Variant
  source 1..2208: mol_type = other DNA
atggctgccgatggttatcttccagattggctcgaggacaaccttagtgaaggaattcgcgagtggtgggctttgaaacctggagcccctcaacccaaggcaaatcaacaacatcaagacaacgctcgaggtcttgtgcttccgggttacaaataccttggacccggcaacggactcgacaagggggagccggtcaacgcagcagacgcggcggccctcgagcacgacaaggcctacgaccagcagctcaaggccggagacaacccgtacctcaagtacaaccacgccgacgccgagttccaggagcggctcaaagaagatacgtcttttgggggcaacctcgggcgagcagtcttccaggccaaaaagaggcttcttgaacctcttggtctggttgaggaagcggctaagacggctcctggaaagaagaggcctgtagagcagtctcctcaggaaccggactcctccgcgggtattggcaaatcgggtgcacagcccgctaaaaagagactcaatttcggtcagactggcgacacagagtcagtcccagaccctcaaccaatcggagaacctcccgcagccccctcaggtgtgggatctcttacaatggcttcaggtggtggcgcaccagtggcagacaataacgaaggtgccgatggagtgggtagttcctcgggaaattggcattgcgattcccaatggctgggggacagagtcatcaccaccagcacccgaacctgggccctgcccacctacaacaatcacctctacaagcaaatctccaacagcacatctggaggatcttcaaatgacaacgcctacttcggctacagcaccccctgggggtattttgacttcaacagattccactgccacttctcaccacgtgactggcagcgactcatcaacaacaactggggattccggcctaagcgactcaacttcaagctcttcaacattcaggtcaaagaggttacggacaacaatggagtcaagaccatcgccaataaccttaccagcacggtccaggtcttcacggactcagactatcagctcccgtacgtgctcgggtcggctcacgagggctgcctcccgccgttcccagcggacgttttcatgattcctcagtacgggtatctgacgcttaatgatggaagccaggccgtgggtcgttcgtccttttactgcctggaatatttcccgtcgcaaatgctaagaacgggtaacaacttccagttcagctacgagtttgagaacgtacctttccatagcagctacgctcacagccaaagcctggaccgactaatgaatccactcatcgaccaatacttgtactatctctcaaagactattaacggttctggacagaatcaacaaacgctaaaattcagtgtggccggacccagcaacatggctgtccagggaagaaactacatacctggacccagctaccgacaacaacgtgtctcaaccactgtgactcaaaacaacaacagcgaatttgcttggcctggagcttcttcttgggctctcaatggacgtaatagcttgatgaatcctggacctgctatggccagccacaaagaaggagaggaccgtttctttcctttgtctggatctttaatttttggcaaacaaggaactggaagagacaacgtgagggcggacaaagtcatgataaccaacgaagaagaaattaaaactactaacccggtagcaacggagtcctatggacaagtggccacaaaccaccagagtgcccaagcacaggcgcagaccggctgggttcaaaaccaaggaatacttccgggtatggtttggcaggacagagatgtgtacctgcaaggacccatttgggccaaaattcctcacacggacggcaactttcacccttctccgctgatgggagggtttggaatgaagcacccgcctcctcagatcctcatcaaaaacacacctgtacctgcggatcctccaacggccttcaacaaggacaagctgaactctttcatcacccagtattctactggccaagtcagcgtggagatcgagtgggagctgcagaaggaaaacagcaagcgctggaacccggagatccagtacacttccaactattacaagtctaataatgttgaatttgctgttaatactgaaggtgtatatagtgaaccccgccccattggcaccagatacctgactcgtaatctg

SEQ ID NO: 98 - protein, 736 aa, synthetic construct
  REGION 1..736: note = Adeno Associated Virus Capsid Protein Variant
MAADGYLPDWLEDNLSEGIREWWALKPGAPQPKANQQHQDNARGLVLPGYKYLGPGNGLDKGEPVNAADAAALEHDKAYDQQLKAGDNPYLKYNHADAEFQERLKEDTSFGGNLGRAVFQAKKRLLEPLGLVEEAAKTAPGKKRPVEQSPQEPDSSAGIGKSGAQPAKKRLNFGQTGDTESVPDPQPIGEPPAAPSGVGSLTMASGGGAPVADNNEGADGVGSSSGNWHCDSQWLGDRVITTSTRTWALPTYNNHLYKQISNSTSGGSSNDNAYFGYSTPWGYFDFNRFHCHFSPRDWQRLINNNWGFRPKRLNFKLFNIQVKEVTDNNGVKTIANNLTSTVQVFTDSDYQLPYVLGSAHEGCLPPFPADVFMIPQYGYLTLNDGSQAVGRSSFYCLEYFPSQMLRTGNNFQFSYEFENVPFHSSYAHSQSLDRLMNPLIDQYLYYLSKTINGSGQNQQTLKFSVAGPSNMAVQGRNYIPGPSYRQQRVSTTVTQNNNSEFAWPGASSWALNGRNSLMNPGPAMASHKEGEDRFFPLSGSLIFGKQGTGRDNVRADKVMITNEEEIKTTNPVATESYGQVATNHQSAQAQAQTGWVQNQGILPGMVWQDRDVYLQGPIWAKIPHTDGNFHPSPLMGGFGMKHPPPQILIKNTPVPADPPTAFNKDKLNSFITQYSTGQVSVEIEWELQKENSKRWNPEIQYTSNYYKSNNVEFAVNTEGVYSEPRPIGTRYLTRNL

SEQ ID NO: 99 - DNA, 2208 bp, synthetic construct
  misc_feature 1..2208: note = Adeno Associated Virus Capsid Protein Variant
  source 1..2208: mol_type = other DNA
atggctgccgatggttatcttccagattggctcgaggacaaccttagtgaaggaattcgcgagtggtgggctttgaaacctggagcccctcaacccaaggcaaatcaacaacatcaagacaacgctcgaggtcttgtgcttccgggttacaaataccttggacccggcaacggactcgacaagggggagccggtcaacgcagcagacgcggcggccctcgagcacgacaaggcctacgaccagcagctcaaggccggagacaacccgtacctcaagtacaaccacgccgacgccgagttccaggagcggctcaaagaagatacgtcttttgggggcaacctcgggcgagcagtcttccaggccaaaaagaggcttcttgaacctcttggtctggttgaggaagcggctaagacggctcctggaaagaagaggcctgtagagcagtctcctcaggaaccggactcctccgcgggtattggcaaatcgggtgcacagcccgctaaaaagagactcaatttcggtcagactggcgacacagagtcagtcccagaccctcaaccaatcggagaacctcccgcagccccctcaggtgtgggatctcttacaatggcttcaggtggtggcgcaccagtggcagacaataacgaaggtgccgatggagtgggtagttcctcgggaaattggcattgcgattcccaatggctgggggacagagtcatcaccaccagcacccgaacctgggccctgcccacctacaacaatcacctctacaagcaaatctccaacagcacatctggaggatcttcaaatgacaacgcctacttcggctacagcaccccctgggggtattttgacttcaacagattccactgccacttctcaccacgtgactggcagcgactcatcaacaacaactggggattccggcctaagcgactcaacttcaagctcttcaacattcaggtcaaagaggttacggacaacaatggagtcaagaccatcgccaataaccttaccagcacggtccaggtcttcacggactcagactatcagctcccgtacgtgctcgggtcggctcacgagggctgcctcccgccgttcccagcggacgttttcatgattcctcagtacgggtatctgacgcttaatgatggaagccaggccgtgggtcgttcgtccttttactgcctggaatatttcccgtcgcaaatgctaagaacgggtaacaacttccagttcagctacgagtttgagaacgtacctttccatagcagctacgctcacagccaaagcctggaccgactaatgaatccactcatcgaccaatacttgtactatctctcaaagactattaacggttctggacagaatcaacaaacgctaaaattcagtgtggccggacccagcaacatggctgtccagggaagaaactacatacctggacccagctaccgacaacaacgtgtctcaaccactgtgactcaaaacaacaacagcgaatttgcttggcctggagcttcttcttgggctctcaatggacgtaatagcttgatgaatcctggacctgctatggccagccacaaagaaggagaggaccgtttctttcctttggggggatctttaatttttggcaaacaaggaactggaagagacaacgtggatgcggacaaagtcatgataaccaacgaagaagaaattaaaactactaacccggtagcaacggagtcctatggacaagtggccacaaaccaccagagtgcccaagcacaggcgcagaccggctgggttcaaaaccaaggaatacttccgggtatggtttggcaggacagagatgtgtacctgcaaggacccatttgggccaaaattcctcacacggacggcaactttcacccttctccgctgatgggagggtttggaatgaagcacccgcctcctcagatcctcatcaaaaacacacctgtacctgcggatcctccaacggccttcaacaaggacaagctgaactctttcatcacccagtattctactggccaagtcagcgtggagatcgagtgggagctgcagaaggaaaacagcaagcgctggaacccggagatccagtacacttccaactattacaagtctaataatgttgaatttgctgttaatactgaaggtgtatatagtgaaccccgccccattggcaccagatacctgactcgtaatctg

SEQ ID NO: 100 - protein, 736 aa, synthetic construct
  REGION 1..736: note = Adeno Associated Virus Capsid Protein Variant
MAADGYLPDWLEDNLSEGIREWWALKPGAPQPKANQQHQDNARGLVLPGYKYLGPGNGLDKGEPVNAADAAALEHDKAYDQQLKAGDNPYLKYNHADAEFQERLKEDTSFGGNLGRAVFQAKKRLLEPLGLVEEAAKTAPGKKRPVEQSPQEPDSSAGIGKSGAQPAKKRLNFGQTGDTESVPDPQPIGEPPAAPSGVGSLTMASGGGAPVADNNEGADGVGSSSGNWHCDSQWLGDRVITTSTRTWALPTYNNHLYKQISNSTSGGSSNDNAYFGYSTPWGYFDFNRFHCHFSPRDWQRLINNNWGFRPKRLNFKLFNIQVKEVTDNNGVKTIANNLTSTVQVFTDSDYQLPYVLGSAHEGCLPPFPADVFMIPQYGYLTLNDGSQAVGRSSFYCLEYFPSQMLRTGNNFQFSYEFENVPFHSSYAHSQSLDRLMNPLIDQYLYYLSKTINGSGQNQQTLKFSVAGPSNMAVQGRNYIPGPSYRQQRVSTTVTQNNNSEFAWPGASSWALNGRNSLMNPGPAMASHKEGEDRFFPLGGSLIFGKQGTGRDNVDADKVMITNEEEIKTTNPVATESYGQVATNHQSAQAQAQTGWVQNQGILPGMVWQDRDVYLQGPIWAKIPHTDGNFHPSPLMGGFGMKHPPPQILIKNTPVPADPPTAFNKDKLNSFITQYSTGQVSVEIEWELQKENSKRWNPEIQYTSNYYKSNNVEFAVNTEGVYSEPRPIGTRYLTRNL

SEQ ID NO: 101 - DNA, 2208 bp, synthetic construct
  misc_feature 1..2208: note = Adeno Associated Virus Capsid Protein Variant
  source 1..2208: mol_type = other DNA
atggctgccgatggttatcttccagattggctcgaggacaaccttagtgaaggaattcgcgagtggtgggctttgaaacctggagcccctcaacccaaggcaaatcaacaacatcaagacaacgctcgaggtcttgtgcttccgggttacaaataccttggacccggcaacggactcgacaagggggagccggtcaacgcagcagacgcggcggccctcgagcacgacaaggcctacgaccagcagctcaaggccggagacaacccgtacctcaagtacaaccacgccgacgccgagttccaggagcggctcaaagaagatacgtcttttgggggcaacctcgggcgagcagtcttccaggccaaaaagaggcttcttgaacctcttggtctggttgaggaagcggctaagacggctcctggaaagaagaggcctgtagagcagtctcctcaggaaccggactcctccgcgggtattggcaaatcgggtgcacagcccgctaaaaagagactcaatttcggtcagactggcgacacagagtcagtcccagaccctcaaccaatcggagaacctcccgcagccccctcaggtgtgggatctcttacaatggcttcaggtggtggcgcaccagtggcagacaataacgaaggtgccgatggagtgggtagttcctcgggaaattggcattgcgattcccaatggctgggggacagagtcatcaccaccagcacccgaacctgggccctgcccacctacaacaatcacctctacaagcaaatctccaacagcacatctggaggatcttcaaatgacaacgcctacttcggctacagcaccccctgggggtattttgacttcaacagattccactgccacttctcaccacgtgactggcagcgactcatcaacaacaactggggattccggcctaagcgactcaacttcaagctcttcaacattcaggtcaaagaggttacggacaacaatggagtcaagaccatcgccaataaccttaccagcacggtccaggtcttcacggactcagactatcagctcccgtacgtgctcgggtcggctcacgagggctgcctcccgccgttcccagcggacgttttcatgattcctcagtacgggtatctgacgcttaatgatggaagccaggccgtgggtcgttcgtccttttactgcctggaatatttcccgtcgcaaatgctaagaacgggtaacaacttccagttcagctacgagtttgagaacgtacctttccatagcagctacgctcacagccaaagcctggaccgactaatgaatccactcatcgaccaatacttgtactatctctcaaagactattaacggttctggacagaatcaacaaacgctaaaattcagtgtggccggacccagcaacatggctgtccagggaagaaactacatacctggacccagctaccgacaacaacgtgtctcaaccactgtgactcaaaacaacaacagcgaatttgcttggcctggagcttcttcttgggctctcaatggacgtaatagcttgatgaatcctggacctgctatggccagccacaaagaaggagaggaccgtttctttcctttgtctggatctttaatttttggcaaacaaggaatgggaagagacaacgtggatgcggacaaagtcatgataaccaacgaagaagaaattaaaactactaacccggtagcaacggagtcctatggacaagtggccacaaaccaccagagtgcccaagcacaggcgcagaccggctgggttcaaaaccaaggaatacttccgggtatggtttggcaggacagagatgtgtacctgcaaggacccatttgggccaaaattcctcacacggacggcaactttcacccttctccgctgatgggagggtttggaatgaagcacccgcctcctcagatcctcatcaaaaacacacctgtacctgcggatcctccaacggccttcaacaaggacaagctgaactctttcatcacccagtattctactggccaagtcagcgtggagatcgagtgggagctgcagaaggaaaacagcaagcgctggaacccggagatccagtacacttccaactattacaagtctaataatgttgaatttgctgttaatactgaaggtgtatatagtgaaccccgccccattggcaccagatacctgactcgtaatctg

SEQ ID NO: 102 - protein, 736 aa, synthetic construct
  REGION 1..736: note = Adeno Associated Virus Capsid Protein Variant
MAADGYLPDWLEDNLSEGIREWWALKPGAPQPKANQQHQDNARGLVLPGYKYLGPGNGLDKGEPVNAADAAALEHDKAYDQQLKAGDNPYLKYNHADAEFQERLKEDTSFGGNLGRAVFQAKKRLLEPLGLVEEAAKTAPGKKRPVEQSPQEPDSSAGIGKSGAQPAKKRLNFGQTGDTESVPDPQPIGEPPAAPSGVGSLTMASGGGAPVADNNEGADGVGSSSGNWHCDSQWLGDRVITTSTRTWALPTYNNHLYKQISNSTSGGSSNDNAYFGYSTPWGYFDFNRFHCHFSPRDWQRLINNNWGFRPKRLNFKLFNIQVKEVTDNNGVKTIANNLTSTVQVFTDSDYQLPYVLGSAHEGCLPPFPADVFMIPQYGYLTLNDGSQAVGRSSFYCLEYFPSQMLRTGNNFQFSYEFENVPFHSSYAHSQSLDRLMNPLIDQYLYYLSKTINGSGQNQQTLKFSVAGPSNMAVQGRNYIPGPSYRQQRVSTTVTQNNNSEFAWPGASSWALNGRNSLMNPGPAMASHKEGEDRFFPLSGSLIFGKQGMGRDNVDADKVMITNEEEIKTTNPVATESYGQVATNHQSAQAQAQTGWVQNQGILPGMVWQDRDVYLQGPIWAKIPHTDGNFHPSPLMGGFGMKHPPPQILIKNTPVPADPPTAFNKDKLNSFITQYSTGQVSVEIEWELQKENSKRWNPEIQYTSNYYKSNNVEFAVNTEGVYSEPRPIGTRYLTRNL

SEQ ID NO: 103 - DNA, 2208 bp, synthetic construct
  misc_feature 1..2208: note = Adeno Associated Virus Capsid Protein Variant
  source 1..2208: mol_type = other DNA
atggctgccgatggttatcttccagattggctcgaggacaaccttagtgaaggaattcgcgagtggtgggctttgaaacctggagcccctcaacccaaggcaaatcaacaacatcaagacaacgctcgaggtcttgtgcttccgggttacaaataccttggacccggcaacggactcgacaagggggagccggtcaacgcagcagacgcggcggccctcgagcacgacaaggcctacgaccagcagctcaaggccggagacaacccgtacctcaagtacaaccacgccgacgccgagttccaggagcggctcaaagaagatacgtcttttgggggcaacctcgggcgagcagtcttccaggccaaaaagaggcttcttgaacctcttggtctggttgaggaagcggctaagacggctcctggaaagaagaggcctgtagagcagtctcctcaggaaccggactcctccgcgggtattggcaaatcgggtgcacagcccgctaaaaagagactcaatttcggtcagactggcgacacagagtcagtcccagaccctcaaccaatcggagaacctcccgcagccccctcaggtgtgggatctcttacaatggcttcaggtggtggcgcaccagtggcagacaataacgaaggtgccgatggagtgggtagttcctcgggaaattggcattgcgattcccaatggctgggggacagagtcatcaccaccagcacccgaacctgggccctgcccacctacaacaatcacctctacaagcaaatctccaacagcacatctggaggatcttcaaatgacaacgcctacttcggctacagcaccccctgggggtattttgacttcaacagattccactgccacttctcaccacgtgactggcagcgactcatcaacaacaactggggattccggcctaagcgactcaacttcaagctcttcaacattcaggtcaaagaggttacggacaacaatggagtcaagaccatcgccaataaccttaccagcacggtccaggtcttcacggactcagactatcagctcccgtacgtgctcgggtcggctcacgagggctgcctcccgccgttcccagcggacgttttcatgattcctcagtacgggtatctgacgcttaatgatggaagccaggccgtgggtcgttcgtccttttactgcctggaatatttcccgtcgcaaatgctaagaacgggtaacaacttccagttcagctacgagtttgagaacgtacctttccatagcagctacgctcacagccaaagcctggaccgactaatgaatccactcatcgaccaatacttgtactatctctcaaagactattaacggttctggacagaatcaacaaacgctaaaattcagtgtggccggacccagcaacatggctgtccagggaagaaactacatacctggacccagctaccgacaacaacgtgtctcaaccactgtgactcaaaacaacaacagcgaatttgcttggcctggagcttcttcttgggctctcaatggacgtaatagcttgatgaatcctggacctgctatggccagccacaaagaaggagaggaccgtttctttcctttgtctggatctttaatttttggcaaacaaggaactggaagagacgtggtggatgcggacaaagtcatgataaccaacgaagaagaaattaaaactactaacccggtagcaacggagtcctatggacaagtggccacaaaccaccagagtgcccaagcacaggcgcagaccggctgggttcaaaaccaaggaatacttccgggtatggtttggcaggacagagatgtgtacctgcaaggacccatttgggccaaaattcctcacacggacggcaactttcacccttctccgctgatgggagggtttggaatgaagcacccgcctcctcagatcctcatcaaaaacacacctgtacctgcggatcctccaacggccttcaacaaggacaagctgaactctttcatcacccagtattctactggccaagtcagcgtggagatcgagtgggagctgcagaaggaaaacagcaagcgctggaacccggagatccagtacacttccaactattacaagtctaataatgttgaatttgctgttaatactgaaggtgtatatagtgaaccccgccccattggcaccagatacctgactcgtaatctg

SEQ ID NO: 104 - protein, 736 aa, synthetic construct
  REGION 1..736: note = Adeno Associated Virus Capsid Protein Variant
MAADGYLPDWLEDNLSEGIREWWALKPGAPQPKANQQHQDNARGLVLPGYKYLGPGNGLDKGEPVNAADAAALEHDKAYDQQLKAGDNPYLKYNHADAEFQERLKEDTSFGGNLGRAVFQAKKRLLEPLGLVEEAAKTAPGKKRPVEQSPQEPDSSAGIGKSGAQPAKKRLNFGQTGDTESVPDPQPIGEPPAAPSGVGSLTMASGGGAPVADNNEGADGVGSSSGNWHCDSQWLGDRVITTSTRTWALPTYNNHLYKQISNSTSGGSSNDNAYFGYSTPWGYFDFNRFHCHFSPRDWQRLINNNWGFRPKRLNFKLFNIQVKEVTDNNGVKTIANNLTSTVQVFTDSDYQLPYVLGSAHEGCLPPFPADVFMIPQYGYLTLNDGSQAVGRSSFYCLEYFPSQMLRTGNNFQFSYEFENVPFHSSYAHSQSLDRLMNPLIDQYLYYLSKTINGSGQNQQTLKFSVAGPSNMAVQGRNYIPGPSYRQQRVSTTVTQNNNSEFAWPGASSWALNGRNSLMNPGPAMASHKEGEDRFFPLSGSLIFGKQGTGRDVVDADKVMITNEEEIKTTNPVATESYGQVATNHQSAQAQAQTGWVQNQGILPGMVWQDRDVYLQGPIWAKIPHTDGNFHPSPLMGGFGMKHPPPQILIKNTPVPADPPTAFNKDKLNSFITQYSTGQVSVEIEWELQKENSKRWNPEIQYTSNYYKSNNVEFAVNTEGVYSEPRPIGTRYLTRNL

SEQ ID NO: 105 - DNA, 2208 bp, synthetic construct
  misc_feature 1..2208: note = Adeno Associated Virus Capsid Protein Variant
  source 1..2208: mol_type = other DNA
atggctgccgatggttatcttccagattggctcgaggacaaccttagtgaaggaattcgcgagtggtgggctttgaaacctggagcccctcaacccaaggcaaatcaacaacatcaagacaacgctcgaggtcttgtgcttccgggttacaaataccttggacccggcaacggactcgacaagggggagccggtcaacgcagcagacgcggcggccctcgagcacgacaaggcctacgaccagcagctcaaggccggagacaacccgtacctcaagtacaaccacgccgacgccgagttccaggagcggctcaaagaagatacgtcttttgggggcaacctcgggcgagcagtcttccaggccaaaaagaggcttcttgaacctcttggtctggttgaggaagcggctaagacggctcctggaaagaagaggcctgtagagcagtctcctcaggaaccggactcctccgcgggtattggcaaatcgggtgcacagcccgctaaaaagagactcaatttcggtcagactggcgacacagagtcagtcccagaccctcaaccaatcggagaacctcccgcagccccctcaggtgtgggatctcttacaatggcttcaggtggtggcgcaccagtggcagacaataacgaaggtgccgatggagtgggtagttcctcgggaaattggcattgcgattcccaatggctgggggacagagtcatcaccaccagcacccgaacctgggccctgcccacctacaacaatcacctctacaagcaaatctccaacagcacatctggaggatcttcaaatgacaacgcctacttcggctacagcaccccctgggggtattttgacttcaacagattccactgccacttctcaccacgtgactggcagcgactcatcaacaacaactggggattccggcctaagcgactcaacttcaagctcttcaacattcaggtcaaagaggttacggacaacaatggagtcaagaccatcgccaataaccttaccagcacggtccaggtcttcacggactcagactatcagctcccgtacgtgctcgggtcggctcacgagggctgcctcccgccgttcccagcggacgttttcatgattcctcagtacgggtatctgacgcttaatgatggaagccaggccgtgggtcgttcgtccttttactgcctggaatatttcccgtcgcaaatgctaagaacgggtaacaacttccagttcagctacgagtttgagaacgtacctttccatagcagctacgctcacagccaaagcctggaccgactaatgaatccactcatcgaccaatacttgtactatctctcaaagactattaacggttctggacagaatcaacaaacgctaaaattcagtgtggccggacccagcaacatggctgtccagggaagaaactacatacctggacccagctaccgacaacaacgtgtctcaaccactgtgactcaaaacaacaacagcgaatttgcttggcctggagcttcttcttgggctctcaatggacgtaatagcttgatgaatcctggacctgctatggccagccacaaagaaggagaggaccgtttctttcctttgtctggatctttaatttttggcaaacaaggaactggaagagacaacgtggatgcgactaaagtcatgataaccaacgaagaagaaattaaaactactaacccggtagcaacggagtcctatggacaagtggccacaaaccaccagagtgcccaagcacaggcgcagaccggctgggttcaaaaccaaggaatacttccgggtatggtttggcaggacagagatgtgtacctgcaaggacccatttgggccaaaattcctcacacggacggcaactttcacccttctccgctgatgggagggtttggaatgaagcacccgcctcctcagatcctcatcaaaaacacacctgtacctgcggatcctccaacggccttcaacaaggacaagctgaactctttcatcacccagtattctactggccaagtcagcgtggagatcgagtgggagctgcagaaggaaaacagcaagcgctggaacccggagatccagtacacttccaactattacaagtctaataatgttgaatttgctgttaatactgaaggtgtatatagtgaaccccgccccattggcaccagatacctgactcgtaatctg

SEQ ID NO: 106 - protein, 736 aa, synthetic construct
  REGION 1..736: note = Adeno Associated Virus Capsid Protein Variant
MAADGYLPDWLEDNLSEGIREWWALKPGAPQPKANQQHQDNARGLVLPGYKYLGPGNGLDKGEPVNAADAAALEHDKAYDQQLKAGDNPYLKYNHADAEFQERLKEDTSFGGNLGRAVFQAKKRLLEPLGLVEEAAKTAPGKKRPVEQSPQEPDSSAGIGKSGAQPAKKRLNFGQTGDTESVPDPQPIGEPPAAPSGVGSLTMASGGGAPVADNNEGADGVGSSSGNWHCDSQWLGDRVITTSTRTWALPTYNNHLYKQISNSTSGGSSNDNAYFGYSTPWGYFDFNRFHCHFSPRDWQRLINNNWGFRPKRLNFKLFNIQVKEVTDNNGVKTIANNLTSTVQVFTDSDYQLPYVLGSAHEGCLPPFPADVFMIPQYGYLTLNDGSQAVGRSSFYCLEYFPSQMLRTGNNFQFSYEFENVPFHSSYAHSQSLDRLMNPLIDQYLYYLSKTINGSGQNQQTLKFSVAGPSNMAVQGRNYIPGPSYRQQRVSTTVTQNNNSEFAWPGASSWALNGRNSLMNPGPAMASHKEGEDRFFPLSGSLIFGKQGTGRDNVDATKVMITNEEEIKTTNPVATESYGQVATNHQSAQAQAQTGWVQNQGILPGMVWQDRDVYLQGPIWAKIPHTDGNFHPSPLMGGFGMKHPPPQILIKNTPVPADPPTAFNKDKLNSFITQYSTGQVSVEIEWELQKENSKRWNPEIQYTSNYYKSNNVEFAVNTEGVYSEPRPIGTRYLTRNL

SEQ ID NO: 107 - DNA, 2208 bp, synthetic construct
  misc_feature 1..2208: note = Adeno Associated Virus Capsid Protein Variant
  source 1..2208: mol_type = other DNA
atggctgccgatggttatcttccagattggctcgaggacaaccttagtgaaggaattcgcgagtggtgggctttgaaacctggagcccctcaacccaaggcaaatcaacaacatcaagacaacgctcgaggtcttgtgcttccgggttacaaataccttggacccggcaacggactcgacaagggggagccggtcaacgcagcagacgcggcggccctcgagcacgacaaggcctacgaccagcagctcaaggccggagacaacccgtacctcaagtacaaccacgccgacgccgagttccaggagcggctcaaagaagatacgtcttttgggggcaacctcgggcgagcagtcttccaggccaaaaagaggcttcttgaacctcttggtctggttgaggaagcggctaagacggctcctggaaagaagaggcctgtagagcagtctcctcaggaaccggactcctccgcgggtattggcaaatcgggtgcacagcccgctaaaaagagactcaatttcggtcagactggcgacacagagtcagtcccagaccctcaaccaatcggagaacctcccgcagccccctcaggtgtgggatctcttacaatggcttcaggtggtggcgcaccagtggcagacaataacgaaggtgccgatggagtgggtagttcctcgggaaattggcattgcgattcccaatggctgggggacagagtcatcaccaccagcacccgaacctgggccctgcccacctacaacaatcacctctacaagcaaatctccaacagcacatctggaggatcttcaaatgacaacgcctacttcggctacagcaccccctgggggtattttgacttcaacagattccactgccacttctcaccacgtgactggcagcgactcatcaacaacaactggggattccggcctaagcgactcaacttcaagctcttcaacattcaggtcaaagaggttacggacaacaatggagtcaagaccatcgccaataaccttaccagcacggtccaggtcttcacggactcagactatcagctcccgtacgtgctcgggtcggctcacgagggctgcctcccgccgttcccagcggacgttttcatgattcctcagtacgggtatctgacgcttaatgatggaagccaggccgtgggtcgttcgtccttttactgcctggaatatttcccgtcgcaaatgctaagaacgggtaacaacttccagttcagctacgagtttgagaacgtacctttccatagcagctacgctcacagccaaagcctggaccgactaatgaatccactcatcgaccaatacttgtactatctctcaaagactattaacggttctggacagaatcaacaaacgctaaaattcagtgtggccggacccagcaacatggctgtccagggaagaaactacatacctggacccagctaccgacaacaacgtgtctcaacccgtgtgactcaaaacaacaacagcgaatttgcttggcctggagcttcttcttgggctctcaatggacgtaatagcttgatgaatcctggacctgctatggccagccacaaagaaggagaggaccgtttctttcctttgtctggatctttaatttttggcaaacaaggaactggaagagacaacgtggatgcggacaaagtcatgataaccaacgaagaagaaattaaaactactaacccggtagcaacggagtcctatggacaagtggccacaaaccaccagagtgcccaagcacaggcgcagaccggctgggttcaaaaccaaggaatacttccgggtatggtttggcaggacagagatgtgtacctgcaaggacccatttgggccaaaattcctcacacggacggcaactttcacccttctccgctgatgggagggtttggaatgaagcacccgcctcctcagatcctcatcaaaaacacacctgtacctgcggatcctccaacggccttcaacaaggacaagctgaactctttcatcacccagtattctactggccaagtcagcgtggagatcgagtgggagctgcagaaggaaaacagcaagcgctggaacccggagatccagtacacttccaactattacaagtctaataatgttgaatttgctgttaatactgaaggtgtatatagtgaaccccgccccattggcaccagatacctgactcgtaatctg

SEQ ID NO: 108 - protein, 736 aa, synthetic construct
  REGION 1..736: note = Adeno Associated Virus Capsid Protein Variant
MAADGYLPDWLEDNLSEGIREWWALKPGAPQPKANQQHQDNARGLVLPGYKYLGPGNGLDKGEPVNAADAAALEHDKAYDQQLKAGDNPYLKYNHADAEFQERLKEDTSFGGNLGRAVFQAKKRLLEPLGLVEEAAKTAPGKKRPVEQSPQEPDSSAGIGKSGAQPAKKRLNFGQTGDTESVPDPQPIGEPPAAPSGVGSLTMASGGGAPVADNNEGADGVGSSSGNWHCDSQWLGDRVITTSTRTWALPTYNNHLYKQISNSTSGGSSNDNAYFGYSTPWGYFDFNRFHCHFSPRDWQRLINNNWGFRPKRLNFKLFNIQVKEVTDNNGVKTIANNLTSTVQVFTDSDYQLPYVLGSAHEGCLPPFPADVFMIPQYGYLTLNDGSQAVGRSSFYCLEYFPSQMLRTGNNFQFSYEFENVPFHSSYAHSQSLDRLMNPLIDQYLYYLSKTINGSGQNQQTLKFSVAGPSNMAVQGRNYIPGPSYRQQRVSTRVTQNNNSEFAWPGASSWALNGRNSLMNPGPAMASHKEGEDRFFPLSGSLIFGKQGTGRDNVDADKVMITNEEEIKTTNPVATESYGQVATNHQSAQAQAQTGWVQNQGILPGMVWQDRDVYLQGPIWAKIPHTDGNFHPSPLMGGFGMKHPPPQILIKNTPVPADPPTAFNKDKLNSFITQYSTGQVSVEIEWELQKENSKRWNPEIQYTSNYYKSNNVEFAVNTEGVYSEPRPIGTRYLTRNL

SEQ ID NO: 109 - DNA, 2208 bp, synthetic construct
  misc_feature 1..2208: note = Adeno Associated Virus Capsid Protein Variant
  source 1..2208: mol_type = other DNA
atggctgccgatggttatcttccagattggctcgaggacaaccttagtgaaggaattcgcgagtggtgggctttgaaacctggagcccctcaacccaaggcaaatcaacaacatcaagacaacgctcgaggtcttgtgcttccgggttacaaataccttggacccggcaacggactcgacaagggggagccggtcaacgcagcagacgcggcggccctcgagcacgacaaggcctacgaccagcagctcaaggccggagacaacccgtacctcaagtacaaccacgccgacgccgagttccaggagcggctcaaagaagatacgtcttttgggggcaacctcgggcgagcagtcttccaggccaaaaagaggcttcttgaacctcttggtctggttgaggaagcggctaagacggctcctggaaagaagaggcctgtagagcagtctcctcaggaaccggactcctccgcgggtattggcaaatcgggtgcacagcccgctaaaaagagactcaatttcggtcagactggcgacacagagtcagtcccagaccctcaaccaatcggagaacctcccgcagccccctcaggtgtgggatctcttacaatggcttcaggtggtggcgcaccagtggcagacaataacgaaggtgccgatggagtgggtagttcctcgggaaattggcattgcgattcccaatggctgggggacagagtcatcaccaccagcacccgaacctgggccctgcccacctacaacaatcacctctacaagcaaatctccaacagcacatctggaggatcttcaaatgacaacgcctacttcggctacagcaccccctgggggtattttgacttcaacagattccactgccacttctcaccacgtgactggcagcgactcatcaacaacaactggggattccggcctaagcgactcaacttcaagctcttcaacattcaggtcaaagaggttacggacaacaatggagtcaagaccatcgccaataaccttaccagcacggtccaggtcttcacggactcagactatcagctcccgtacgtgctcgggtcggctcacgagggctgcctcccgccgttcccagcggacgttttcatgattcctcagtacgggtatctgacgcttaatgatggaagccaggccgtgggtcgttcgtccttttactgcctggaatatttcccgtcgcaaatgctaagaacgggtaacaacttccagttcagctacgagtttgagaacgtacctttccatagcagctacgctcacagccaaagcctggaccgactaatgaatccactcatcgaccaatacttgtactatctctcaaagactattaacggttctggacagaatcaacaaacgctaaaattcagtgtggccggacccagcaacatggctgtccagggaagaaactacatacctggacccagctaccgacaacaacgtgtctcaaccactgtgactcaaaacaacaacagcgaatttgcttggcctggagcttcttcttgggctctcaatggacgtaatagcttgatgaatcctggacctgctatggccagccacaaagaaggagaggtgcgtttctttcctttgtctggatctttaatttttggcaaacaaggaactggaagagacaacgtggatgcggacaaagtcatgataaccaacgaagaagaaattaaaactactaacccggtagcaacggagtcctatggacaagtggccacaaaccaccagagtgcccaagcacaggcgcagaccggctgggttcaaaaccaaggaatacttccgggtatggtttggcaggacagagatgtgtacctgcaaggacccatttgggccaaaattcctcacacggacggcaactttcacccttctccgctgatgggagggtttggaatgaagcacccgcctcctcagatcctcatcaaaaacacacctgtacctgcggatcctccaacggccttcaacaaggacaagctgaactctttcatcacccagtattctactggccaagtcagcgtggagatcgagtgggagctgcagaaggaaaacagcaagcgctggaacccggagatccagtacacttccaactattacaagtctaataatgttgaatttgctgttaatactgaaggtgtatatagtgaaccccgccccattggcaccagatacctgactcgtaatctg

SEQ ID NO: 110 - protein, 736 aa, synthetic construct
  REGION 1..736: note = Adeno Associated Virus Capsid Protein Variant
MAADGYLPDWLEDNLSEGIREWWALKPGAPQPKANQQHQDNARGLVLPGYKYLGPGNGLDKGEPVNAADAAALEHDKAYDQQLKAGDNPYLKYNHADAEFQERLKEDTSFGGNLGRAVFQAKKRLLEPLGLVEEAAKTAPGKKRPVEQSPQEPDSSAGIGKSGAQPAKKRLNFGQTGDTESVPDPQPIGEPPAAPSGVGSLTMASGGGAPVADNNEGADGVGSSSGNWHCDSQWLGDRVITTSTRTWALPTYNNHLYKQISNSTSGGSSNDNAYFGYSTPWGYFDFNRFHCHFSPRDWQRLINNNWGFRPKRLNFKLFNIQVKEVTDNNGVKTIANNLTSTVQVFTDSDYQLPYVLGSAHEGCLPPFPADVFMIPQYGYLTLNDGSQAVGRSSFYCLEYFPSQMLRTGNNFQFSYEFENVPFHSSYAHSQSLDRLMNPLIDQYLYYLSKTINGSGQNQQTLKFSVAGPSNMAVQGRNYIPGPSYRQQRVSTTVTQNNNSEFAWPGASSWALNGRNSLMNPGPAMASHKEGEVRFFPLSGSLIFGKQGTGRDNVDADKVMITNEEEIKTTNPVATESYGQVATNHQSAQAQAQTGWVQNQGILPGMVWQDRDVYLQGPIWAKIPHTDGNFHPSPLMGGFGMKHPPPQILIKNTPVPADPPTAFNKDKLNSFITQYSTGQVSVEIEWELQKENSKRWNPEIQYTSNYYKSNNVEFAVNTEGVYSEPRPIGTRYLTRNL

SEQ ID NO: 111 - DNA, 2208 bp, synthetic construct
  misc_feature 1..2208: note = Adeno Associated Virus Capsid Protein Variant
  source 1..2208: mol_type = other DNA
atggctgccgatggttatcttccagattggctcgaggacaaccttagtgaaggaattcgcgagtggtgggctttgaaacctggagcccctcaacccaaggcaaatcaacaacatcaagacaacgctcgaggtcttgtgcttccgggttacaaataccttggacccggcaacggactcgacaagggggagccggtcaacgcagcagacgcggcggccctcgagcacgacaaggcctacgaccagcagctcaaggccggagacaacccgtacctcaagtacaaccacgccgacgccgagttccaggagcggctcaaagaagatacgtcttttgggggcaacctcgggcgagcagtcttccaggccaaaaagaggcttcttgaacctcttggtctggttgaggaagcggctaagacggctcctggaaagaagaggcctgtagagcagtctcctcaggaaccggactcctccgcgggtattggcaaatcgggtgcacagcccgctaaaaagagactcaatttcggtcagactggcgacacagagtcagtcccagaccctcaaccaatcggagaacctcccgcagccccctcaggtgtgggatctcttacaatggcttcaggtggtggcgcaccagtggcagacaataacgaaggtgccgatggagtgggtagttcctcgggaaattggcattgcgattcccaatggctgggggacagagtcatcaccaccagcacccgaacctgggccctgcccacctacaacaatcacctctacaagcaaatctccaacagcacatctggaggatcttcaaatgacaacgcctacttcggctacagcaccccctgggggtattttgacttcaacagattccactgccacttctcaccacgtgactggcagcgactcatcaacaacaactggggattccggcctaagcgactcaacttcaagctcttcaacattcaggtcaaagaggttacggacaacaatggagtcaagaccatcgccaataaccttaccagcacggtccaggtcttcacggactcagactatcagctcccgtacgtgctcgggtcggctcacgagggctgcctcccgccgttcccagcggacgttttcatgattcctcagtacgggtatctgacgcttaatgatggaagccaggccgtgggtcgttcgtccttttactgcctggaatatttcccgtcgcaaatgctaagaacgggtaacaacttccagttcagctacgagtttgagaacgtacctttccatagcagctacgctcacagccaaagcctggaccgactaatgaatccactcatcgaccaatacttgtactatctctcaaagactattaacggttctggacagaatcaacaaacgctaaaattcagtgtggccggacccagcaacatggctgtccagggaagaaactacatacctggacccagctaccgacaacaacgtgtctcaaccactgtgactaataacaacaacagcgaatttgcttggcctggagcttcttcttgggctctcaatggacgtaatagcttgatgaatcctggacctgctatggccagccacaaagaaggagaggaccgtttctttcctttgtctggatctttaatttttggcaaacaaggaactggaagagacaacgtggatgcggacaaagtcatgataaccaacgaagaagaaattaaaactactaacccggtagcaacggagtcctatggacaagtggccacaaaccaccagagtgcccaagcacaggcgcagaccggctgggttcaaaaccaaggaatacttccgggtatggtttggcaggacagagatgtgtacctgcaaggacccatttgggccaaaattcctcacacggacggcaactttcacccttctccgctgatgggagggtttggaatgaagcacccgcctcctcagatcctcatcaaaaacacacctgtacctgcggatcctccaacggccttcaacaaggacaagctgaactctttcatcacccagtattctactggccaagtcagcgtggagatcgagtgggagctgcagaaggaaaacagcaagcgctggaacccggagatccagtacacttccaactattacaagtctaataatgttgaatttgctgttaatactgaaggtgtatatagtgaaccccgccccattggcaccagatacctgactcgtaatctg

SEQ ID NO: 112 - protein, 736 aa, synthetic construct
  REGION 1..736: note = Adeno Associated Virus Capsid Protein Variant
MAADGYLPDWLEDNLSEGIREWWALKPGAPQPKANQQHQDNARGLVLPGYKYLGPGNGLDKGEPVNAADAAALEHDKAYDQQLKAGDNPYLKYNHADAEFQERLKEDTSFGGNLGRAVFQAKKRLLEPLGLVEEAAKTAPGKKRPVEQSPQEPDSSAGIGKSGAQPAKKRLNFGQTGDTESVPDPQPIGEPPAAPSGVGSLTMASGGGAPVADNNEGADGVGSSSGNWHCDSQWLGDRVITTSTRTWALPTYNNHLYKQISNSTSGGSSNDNAYFGYSTPWGYFDFNRFHCHFSPRDWQRLINNNWGFRPKRLNFKLFNIQVKEVTDNNGVKTIANNLTSTVQVFTDSDYQLPYVLGSAHEGCLPPFPADVFMIPQYGYLTLNDGSQAVGRSSFYCLEYFPSQMLRTGNNFQFSYEFENVPFHSSYAHSQSLDRLMNPLIDQYLYYLSKTINGSGQNQQTLKFSVAGPSNMAVQGRNYIPGPSYRQQRVSTTVTNNNNSEFAWPGASSWALNGRNSLMNPGPAMASHKEGEDRFFPLSGSLIFGKQGTGRDNVDADKVMITNEEEIKTTNPVATESYGQVATNHQSAQAQAQTGWVQNQGILPGMVWQDRDVYLQGPIWAKIPHTDGNFHPSPLMGGFGMKHPPPQILIKNTPVPADPPTAFNKDKLNSFITQYSTGQVSVEIEWELQKENSKRWNPEIQYTSNYYKSNNVEFAVNTEGVYSEPRPIGTRYLTRNL

SEQ ID NO: 113 - DNA, 2208 bp, synthetic construct
  misc_feature 1..2208: note = Adeno Associated Virus Capsid Protein Variant
  source 1..2208: mol_type = other DNA
atggctgccgatggttatcttccagattggctcgaggacaaccttagtgaaggaattcgcgagtggtgggctttgaaacctggagcccctcaacccaaggcaaatcaacaacatcaagacaacgctcgaggtcttgtgcttccgggttacaaataccttggacccggcaacggactcgacaagggggagccggtcaacgcagcagacgcggcggccctcgagcacgacaaggcctacgaccagcagctcaaggccggagacaacccgtacctcaagtacaaccacgccgacgccgagttccaggagcggctcaaagaagatacgtcttttgggggcaacctcgggcgagcagtcttccaggccaaaaagaggcttcttgaacctcttggtctggttgaggaagcggctaagacggctcctggaaagaagaggcctgtagagcagtctcctcaggaaccggactcctccgcgggtattggcaaatcgggtgcacagcccgctaaaaagagactcaatttcggtcagactggcgacacagagtcagtcccagaccctcaaccaatcggagaacctcccgcagccccctcaggtgtgggatctcttacaatggcttcaggtggtggcgcaccagtggcagacaataacgaaggtgccgatggagtgggtagttcctcgggaaattggcattgcgattcccaatggctgggggacagagtcatcaccaccagcacccgaacctgggccctgcccacctacaacaatcacctctacaagcaaatctccaacagcacatctggaggatcttcaaatgacaacgcctacttcggctacagcaccccctgggggtattttgacttcaacagattccactgccacttctcaccacgtgactggcagcgactcatcaacaacaactggggattccggcctaagcgactcaacttcaagctcttcaacattcaggtcaaagaggttacggacaacaatggagtcaagaccatcgccaataaccttaccagcacggtccaggtcttcacggactcagactatcagctcccgtacgtgctcgggtcggctcacgagggctgcctcccgccgttcccagcggacgttttcatgattcctcagtacgggtatctgacgcttaatgatggaagccaggccgtgggtcgttcgtccttttactgcctggaatatttcccgtcgcaaatgctaagaacgggtaacaacttccagttcagctacgagtttgagaacgtacctttccatagcagctacgctcacagccaaagcctggaccgactaatgaatccactcatcgaccaatacttgtactatctctcaaagactattaacggttctggacagaatcaacaaacgctaaaattcagtgtggccggacccagcaacatggctgtccagggaagaaactacatacctggacccagctaccgacaacaacgtgtctcaaccactgtgactcaaaacaacaacagcgaatttgcttggcctggagcttcttcttgggctctcaatggacgtaatagcttgatgaatcctggacctgctatggccagccacaaagaaggagaggaccgtttctttcctttgtctggatctttaatttttggcaaacaaggaactggaagagacaacgtggatgcggacaaagtcatgataaccaacgaagaagaaattaaaactactaacccggtagcaacggagtcctatggacaagtggccacaaaccaccagagtgcccgtgcacaggcgcagaccggctgggttcaaaaccaaggaatacttccgggtatggtttggcaggacagagatgtgtacctgcaaggacccatttgggccaaaattcctcacacggacggcaactttcacccttctccgctgatgggagggtttggaatgaagcacccgcctcctcagatcctcatcaaaaacacacctgtacctgcggatcctccaacggccttcaacaaggacaagctgaactctttcatcacccagtattctactggccaagtcagcgtggagatcgagtgggagctgcagaaggaaaacagcaagcgctggaacccggagatccagtacacttccaactattacaagtctaataatgttgaatttgctgttaatactgaaggtgtatatagtgaaccccgccccattggcaccagatacctgactcgtaatctg

SEQ ID NO: 114 - protein, 736 aa, synthetic construct
  REGION 1..736: note = Adeno Associated Virus Capsid Protein Variant
MAADGYLPDWLEDNLSEGIREWWALKPGAPQPKANQQHQDNARGLVLPGYKYLGPGNGLDKGEPVNAADAAALEHDKAYDQQLKAGDNPYLKYNHADAEFQERLKEDTSFGGNLGRAVFQAKKRLLEPLGLVEEAAKTAPGKKRPVEQSPQEPDSSAGIGKSGAQPAKKRLNFGQTGDTESVPDPQPIGEPPAAPSGVGSLTMASGGGAPVADNNEGADGVGSSSGNWHCDSQWLGDRVITTSTRTWALPTYNNHLYKQISNSTSGGSSNDNAYFGYSTPWGYFDFNRFHCHFSPRDWQRLINNNWGFRPKRLNFKLFNIQVKEVTDNNGVKTIANNLTSTVQVFTDSDYQLPYVLGSAHEGCLPPFPADVFMIPQYGYLTLNDGSQAVGRSSFYCLEYFPSQMLRTGNNFQFSYEFENVPFHSSYAHSQSLDRLMNPLIDQYLYYLSKTINGSGQNQQTLKFSVAGPSNMAVQGRNYIPGPSYRQQRVSTTVTQNNNSEFAWPGASSWALNGRNSLMNPGPAMASHKEGEDRFFPLSGSLIFGKQGTGRDNVDADKVMITNEEEIKTTNPVATESYGQVATNHQSARAQAQTGWVQNQGILPGMVWQDRDVYLQGPIWAKIPHTDGNFHPSPLMGGFGMKHPPPQILIKNTPVPADPPTAFNKDKLNSFITQYSTGQVSVEIEWELQKENSKRWNPEIQYTSNYYKSNNVEFAVNTEGVYSEPRPIGTRYLTRNL

SEQ ID NO: 115 - DNA, 2208 bp, synthetic construct
  misc_feature 1..2208: note = Adeno Associated Virus Capsid Protein Variant
  source 1..2208: mol_type = other DNA
atggctgccgatggttatcttccagattggctcgaggacaaccttagtgaaggaattcgcgagtggtgggctttgaaacctggagcccctcaacccaaggcaaatcaacaacatcaagacaacgctcgaggtcttgtgcttccgggttacaaataccttggacccggcaacggactcgacaagggggagccggtcaacgcagcagacgcggcggccctcgagcacgacaaggcctacgaccagcagctcaaggccggagacaacccgtacctcaagtacaaccacgccgacgccgagttccaggagcggctcaaagaagatacgtcttttgggggcaacctcgggcgagcagtcttccaggccaaaaagaggcttcttgaacctcttggtctggttgaggaagcggctaagacggctcctggaaagaagaggcctgtagagcagtctcctcaggaaccggactcctccgcgggtattggcaaatcgggtgcacagcccgctaaaaagagactcaatttcggtcagactggcgacacagagtcagtcccagaccctcaaccaatcggagaacctcccgcagccccctcaggtgtgggatctcttacaatggcttcaggtggtggcgcaccagtggcagacaataacgaaggtgccgatggagtgggtagttcctcgggaaattggcattgcgattcccaatggctgggggacagagtcatcaccaccagcacccgaacctgggccctgcccacctacaacaatcacctctacaagcaaatctccaacagcacatctggaggatcttcaaatgacaacgcctacttcggctacagcaccccctgggggtattttgacttcaacagattccactgccacttctcaccacgtgactggcagcgactcatcaacaacaactggggattccggcctaagcgactcaacttcaagctcttcaacattcaggtcaaagaggttacggacaacaatggagtcaagaccatcgccaataaccttaccagcacggtccaggtcttcacggactcagactatcagctcccgtacgtgctcgggtcggctcacgagggctgcctcccgccgttcccagcggacgttttcatgattcctcagtacgggtatctgacgcttaatgatggaagccaggccgtgggtcgttcgtccttttactgcctggaatatttcccgtcgcaaatgctaagaacgggtaacaacttccagttcagctacgagtttgagaacgtacctttccatagcagctacgctcacagccaaagcctggaccgactaatgaatccactcatcgaccaatacttgtactatctctcaaagactattaacggttctggacagaatcaacaagggctaaaattcagtgtggccggacccagcaacatggctgtccagggaagaaactacatacctggacccagctaccgacaacaacgtgtctcaaccactgtgactcaaaacaacaacagcgaatttgcttggcctggagcttcttcttgggctctcaatggacgtaatagcttgatgaatcctggacctgctatggccagccacaaagaaggagaggaccgtttctttcctttgtctggatctttaatttttggcaaacaaggaactggaagagacaacgtggatgcggacaaagtcatgataaccaacgaagaagaaattaaaactactaacccggtagcaacggagtcctatggacaagtggccacaaaccaccagagtgcccaagcacaggcgcagaccggctgggttcaaaaccaaggaatacttccgggtatggtttggcaggacagagatgtgtacctgcaaggacccatttgggccaaaattcctcacacggacggcaactttcacccttctccgctgatgggagggtttggaatgaagcacccgcctcctcagatcctcatcaaaaacacacctgtacctgcggatcctccaacggccttcaacaaggacaagctgaactctttcatcacccagtattctactggccaagtcagcgtggagatcgagtgggagctgcagaaggaaaacagcaagcgctggaacccggagatccagtacacttccaactattacaagtctaataatgttgaatttgctgttaatactgaaggtgtatatagtgaaccccgccccattggcaccagatacctgactcgtaatctg

SEQ ID NO: 116 - protein, 736 aa, synthetic construct
  REGION 1..736: note = Adeno Associated Virus Capsid Protein Variant
MAADGYLPDWLEDNLSEGIREWWALKPGAPQPKANQQHQDNARGLVLPGYKYLGPGNGLDKGEPVNAADAAALEHDKAYDQQLKAGDNPYLKYNHADAEFQERLKEDTSFGGNLGRAVFQAKKRLLEPLGLVEEAAKTAPGKKRPVEQSPQEPDSSAGIGKSGAQPAKKRLNFGQTGDTESVPDPQPIGEPPAAPSGVGSLTMASGGGAPVADNNEGADGVGSSSGNWHCDSQWLGDRVITTSTRTWALPTYNNHLYKQISNSTSGGSSNDNAYFGYSTPWGYFDFNRFHCHFSPRDWQRLINNNWGFRPKRLNFKLFNIQVKEVTDNNGVKTIANNLTSTVQVFTDSDYQLPYVLGSAHEGCLPPFPADVFMIPQYGYLTLNDGSQAVGRSSFYCLEYFPSQMLRTGNNFQFSYEFENVPFHSSYAHSQSLDRLMNPLIDQYLYYLSKTINGSGQNQQGLKFSVAGPSNMAVQGRNYIPGPSYRQQRVSTTVTQNNNSEFAWPGASSWALNGRNSLMNPGPAMASHKEGEDRFFPLSGSLIFGKQGTGRDNVDADKVMITNEEEIKTTNPVATESYGQVATNHQSAQAQAQTGWVQNQGILPGMVWQDRDVYLQGPIWAKIPHTDGNFHPSPLMGGFGMKHPPPQILIKNTPVPADPPTAFNKDKLNSFITQYSTGQVSVEIEWELQKENSKRWNPEIQYTSNYYKSNNVEFAVNTEGVYSEPRPIGTRYLTRNL

SEQ ID NO: 117 - DNA, 2208 bp, synthetic construct
  misc_feature 1..2208: note = Adeno Associated Virus Capsid Protein Variant
  source 1..2208: mol_type = other DNA
atggctgccgatggttatcttccagattggctcgaggacaaccttagtgaaggaattcgcgagtggtgggctttgaaacctggagcccctcaacccaaggcaaatcaacaacatcaagacaacgctcgaggtcttgtgcttccgggttacaaataccttggacccggcaacggactcgacaagggggagccggtcaacgcagcagacgcggcggccctcgagcacgacaaggcctacgaccagcagctcaaggccggagacaacccgtacctcaagtacaaccacgccgacgccgagttccaggagcggctcaaagaagatacgtcttttgggggcaacctcgggcgagcagtcttccaggccaaaaagaggcttcttgaacctcttggtctggttgaggaagcggctaagacggctcctggaaagaagaggcctgtagagcagtctcctcaggaaccggactcctccgcgggtattggcaaatcgggtgcacagcccgctaaaaagagactcaatttcggtcagactggcgacacagagtcagtcccagaccctcaaccaatcggagaacctcccgcagccccctcaggtgtgggatctcttacaatggcttcaggtggtggcgcaccagtggcagacaataacgaaggtgccgatggagtgggtagttcctcgggaaattggcattgcgattcccaatggctgggggacagagtcatcaccaccagcacccgaacctgggccctgcccacctacaacaatcacctctacaagcaaatctccaacagcacatctggaggatcttcaaatgacaacgcctacttcggctacagcaccccctgggggtattttgacttcaacagattccactgccacttctcaccacgtgactggcagcgactcatcaacaacaactggggattccggcctaagcgactcaacttcaagctcttcaacattcaggtcaaagaggttacggacaacaatggagtcaagaccatcgccaataaccttaccagcacggtccaggtcttcacggactcagactatcagctcccgtacgtgctcgggtcggctcacgagggctgcctcccgccgttcccagcggacgttttcatgattcctcagtacgggtatctgacgcttaatgatggaagccaggccgtgggtcgttcgtccttttactgcctggaatatttcccgtcgcaaatgctaagaacgggtaacaacttccagttcagctacgagtttgagaacgtacctttccatagcagctacgctcacagccaaagcctggaccgactaatgaatccactcatcgaccaatacttgtactatctctcaaagactattaacggttctggaatgaatcaacaaacgctaaaattcagtgtggccggacccagcaacatggctgtccagggaagaaactacatacctggacccagctaccgacaacaacgtgtctcaaccactgtgactcaaaacaacaacagcgaatttgcttggcctggagcttcttcttgggctctcaatggacgtaatagcttgatgaatcctggacctgctatggccagccacaaagaaggagaggaccgtttctttcctttgtctggatctttaatttttggcaaacaaggaactggaagagacaacgtggatgcggacaaagtcatgataaccaacgaagaagaaattaaaactactaacccggtagcaacggagtcctatggacaagtggccacaaaccaccagagtgcccaagcacaggcgcagaccggctgggttcaaaaccaaggaatacttccgggtatggtttggcaggacagagatgtgtacctgcaaggacccatttgggccaaaattcctcacacggacggcaactttcacccttctccgctgatgggagggtttggaatgaagcacccgcctcctcagatcctcatcaaaaacacacctgtacctgcggatcctccaacggccttcaacaaggacaagctgaactctttcatcacccagtattctactggccaagtcagcgtggagatcgagtgggagctgcagaaggaaaacagcaagcgctggaacccggagatccagtacacttccaactattacaagtctaataatgttgaatttgctgttaatactgaaggtgtatatagtgaaccccgccccattggcaccagatacctgactcgtaatctg

SEQ ID NO: 118 - protein, 736 aa, synthetic construct
  REGION 1..736: note = Adeno Associated Virus Capsid Protein Variant
MAADGYLPDWLEDNLSEGIREWWALKPGAPQPKANQQHQDNARGLVLPGYKYLGPGNGLDKGEPVNAADAAALEHDKAYDQQLKAGDNPYLKYNHADAEFQERLKEDTSFGGNLGRAVFQAKKRLLEPLGLVEEAAKTAPGKKRPVEQSPQEPDSSAGIGKSGAQPAKKRLNFGQTGDTESVPDPQPIGEPPAAPSGVGSLTMASGGGAPVADNNEGADGVGSSSGNWHCDSQWLGDRVITTSTRTWALPTYNNHLYKQISNSTSGGSSNDNAYFGYSTPWGYFDFNRFHCHFSPRDWQRLINNNWGFRPKRLNFKLFNIQVKEVTDNNGVKTIANNLTSTVQVFTDSDYQLPYVLGSAHEGCLPPFPADVFMIPQYGYLTLNDGSQAVGRSSFYCLEYFPSQMLRTGNNFQFSYEFENVPFHSSYAHSQSLDRLMNPLIDQYLYYLSKTINGSGMNQQTLKFSVAGPSNMAVQGRNYIPGPSYRQQRVSTTVTQNNNSEFAWPGASSWALNGRNSLMNPGPAMASHKEGEDRFFPLSGSLIFGKQGTGRDNVDADKVMITNEEEIKTTNPVATESYGQVATNHQSAQAQAQTGWVQNQGILPGMVWQDRDVYLQGPIWAKIPHTDGNFHPSPLMGGFGMKHPPPQILIKNTPVPADPPTAFNKDKLNSFITQYSTGQVSVEIEWELQKENSKRWNPEIQYTSNYYKSNNVEFAVNTEGVYSEPRPIGTRYLTRNL

SEQ ID NO: 119 - DNA, 2208 bp, synthetic construct
  misc_feature 1..2208: note = Adeno Associated Virus Capsid Protein Variant
  source 1..2208: mol_type = other DNA
atggctgccgatggttatcttccagattggctcgaggacaaccttagtgaaggaattcgcgagtggtgggctttgaaacctggagcccctcaacccaaggcaaatcaacaacatcaagacaacgctcgaggtcttgtgcttccgggttacaaataccttggacccggcaacggactcgacaagggggagccggtcaacgcagcagacgcggcggccctcgagcacgacaaggcctacgaccagcagctcaaggccggagacaacccgtacctcaagtacaaccacgccgacgccgagttccaggagcggctcaaagaagatacgtcttttgggggcaacctcgggcgagcagtcttccaggccaaaaagaggcttcttgaacctcttggtctggttgaggaagcggctaagacggctcctggaaagaagaggcctgtagagcagtctcctcaggaaccggactcctccgcgggtattggcaaatcgggtgcacagcccgctaaaaagagactcaatttcggtcagactggcgacacagagtcagtcccagaccctcaaccaatcggagaacctcccgcagccccctcaggtgtgggatctcttacaatggcttcaggtggtggcgcaccagtggcagacaataacgaaggtgccgatggagtgggtagttcctcgggaaattggcattgcgattcccaatggctgggggacagagtcatcaccaccagcacccgaacctgggccctgcccacctacaacaatcacctctacaagcaaatctccaacagcacatctggaggatcttcaaatgacaacgcctacttcggctacagcaccccctgggggtattttgacttcaacagattccactgccacttctcaccacgtgactggcagcgactcatcaacaacaactggggattccggcctaagcgactcaacttcaagctcttcaacattcaggtcaaagaggttacggacaacaatggagtcaagaccatcgccaataaccttaccagcacggtccaggtcttcacggactcagactatcagctcccgtacgtgctcgggtcggctcacgagggctgcctcccgccgttcccagcggacgttttcatgattcctcagtacgggtatctgacgcttaatgatggaagccaggccgtgggtcgttcgtccttttactgcctggaatatttcccgtcgcaaatgctaagaacgggtaacaacttccagttcagctacgagtttgagaacgtacctttccatagcagctacgctcacagccaaagcctggaccgactaatgaatccactcatcgaccaatacttgtactatctctcaaagactattaacggttctggagttaatcaacaaacgctaaaattcagtgtggccggacccagcaacatggctgtccagggaagaaactacatacctggacccagctaccgacaacaacgtgtctcaaccactgtgactcaaaacaacaacagcgaatttgcttggcctggagcttcttcttgggctctcaatggacgtaatagcttgatgaatcctggacctgctatggccagccacaaagaaggagaggaccgtttctttcctttgtctggatctttaatttttggcaaacaaggaactggaagagacaacgtggatgcggacaaagtcatgataaccaacgaagaagaaattaaaactactaacccggtagcaacggagtcctatggacaagtggccacaaaccaccagagtgcccaagcacaggcgcagaccggctgggttcaaaaccaaggaatacttccgggtatggtttggcaggacagagatgtgtacctgcaaggacccatttgggccaaaattcctcacacggacggcaactttcacccttctccgctgatgggagggtttggaatgaagcacccgcctcctcagatcctcatcaaaaacacacctgtacctgcggatcctccaacggccttcaacaaggacaagctgaactctttcatcacccagtattctactggccaagtcagcgtggagatcgagtgggagctgcagaaggaaaacagcaagcgctggaacccggagatccagtacacttccaactattacaagtctaataatgttgaatttgctgttaatactgaaggtgtatatagtgaaccccgccccattggcaccagatacctgactcgtaatctg

SEQ ID NO: 120 - protein, 736 aa, synthetic construct
  REGION 1..736: note = Adeno Associated Virus Capsid Protein Variant
MAADGYLPDWLEDNLSEGIREWWALKPGAPQPKANQQHQDNARGLVLPGYKYLGPGNGLDKGEPVNAADAAALEHDKAYDQQLKAGDNPYLKYNHADAEFQERLKEDTSFGGNLGRAVFQAKKRLLEPLGLVEEAAKTAPGKKRPVEQSPQEPDSSAGIGKSGAQPAKKRLNFGQTGDTESVPDPQPIGEPPAAPSGVGSLTMASGGGAPVADNNEGADGVGSSSGNWHCDSQWLGDRVITTSTRTWALPTYNNHLYKQISNSTSGGSSNDNAYFGYSTPWGYFDFNRFHCHFSPRDWQRLINNNWGFRPKRLNFKLFNIQVKEVTDNNGVKTIANNLTSTVQVFTDSDYQLPYVLGSAHEGCLPPFPADVFMIPQYGYLTLNDGSQAVGRSSFYCLEYFPSQMLRTGNNFQFSYEFENVPFHSSYAHSQSLDRLMNPLIDQYLYYLSKTINGSGVNQQTLKFSVAGPSNMAVQGRNYIPGPSYRQQRVSTTVTQNNNSEFAWPGASSWALNGRNSLMNPGPAMASHKEGEDRFFPLSGSLIFGKQGTGRDNVDADKVMITNEEEIKTTNPVATESYGQVATNHQSAQAQAQTGWVQNQGILPGMVWQDRDVYLQGPIWAKIPHTDGNFHPSPLMGGFGMKHPPPQILIKNTPVPADPPTAFNKDKLNSFITQYSTGQVSVEIEWELQKENSKRWNPEIQYTSNYYKSNNVEFAVNTEGVYSEPRPIGTRYLTRNL

SEQ ID NO: 121 - DNA, 2208 bp, synthetic construct
  misc_feature 1..2208: note = Adeno Associated Virus Capsid Protein Variant
  source 1..2208: mol_type = other DNA
atggctgccgatggttatcttccagattggctcgaggacaaccttagtgaaggaattcgcgagtggtgggctttgaaacctggagcccctcaacccaaggcaaatcaacaacatcaagacaacgctcgaggtcttgtgcttccgggttacaaataccttggacccggcaacggactcgacaagggggagccggtcaacgcagcagacgcggcggccctcgagcacgacaaggcctacgaccagcagctcaaggccggagacaacccgtacctcaagtacaaccacgccgacgccgagttccaggagcggctcaaagaagatacgtcttttgggggcaacctcgggcgagcagtcttccaggccaaaaagaggcttcttgaacctcttggtctggttgaggaagcggctaagacggctcctggaaagaagaggcctgtagagcagtctcctcaggaaccggactcctccgcgggtattggcaaatcgggtgcacagcccgctaaaaagagactcaatttcggtcagactggcgacacagagtcagtcccagaccctcaaccaatcggagaacctcccgcagccccctcaggtgtgggatctcttacaatggcttcaggtggtggcgcaccagtggcagacaataacgaaggtgccgatggagtgggtagttcctcgggaaattggcattgcgattcccaatggctgggggacagagtcatcaccaccagcacccgaacctgggccctgcccacctacaacaatcacctctacaagcaaatctccaacagcacatctggaggatcttcaaatgacaacgcctacttcggctacagcaccccctgggggtattttgacttcaacagattccactgccacttctcaccacgtgactggcagcgactcatcaacaacaactggggattccggcctaagcgactcaacttcaagctcttcaacattcaggtcaaagaggttacggacaacaatggagtcaagaccatcgccaataaccttaccagcacggtccaggtcttcacggactcagactatcagctcccgtacgtgctcgggtcggctcacgagggctgcctcccgccgttcccagcggacgttttcatgattcctcagtacgggtatctgacgcttaatgatggaagccaggccgtgggtcgttcgtccttttactgcctggaatatttcccgtcgcaaatgctaagaacgggtaacaacttccagttcagctacgagtttgagaacgtacctttccatagcagctacgctcacagccaaagcctggaccgactaatgaatccactcatcgaccaatacttgtactatctctcaaagactattaacggttctggacagaatcaacaaacgctaaaattcagtgtggccggacccagcaacatggctgtccagggaagaaactacatacctggacccagctaccgacaacaacgtgtctcaaccactgtgactcaaaacaacaacagcgaatttgcttggcctggagcttcttcttgggctctcaatggacgtaatagcttgatgaatcctggacctgctatggccagccacaaagaaggagaggaccgtttctttcctttgtctggatctttaatttttggcaaacaaggaactggaagagacaacgtggatgcggacaaagtcatgataaccaacgaagaagaaattaaaactactaacccggtagcaacggagtcctatggacaagtggccacaaaccaccagagtgcccaagcacaggcgcagaccggctgggttcaaaaccaaggaatacttccgggtatggtttggcaggacagagatgtgtacctgcaaggacccatttgggccaaaattcctcacacggacggcaactttcacccttctccgctgatgggagggtttggaatgaagcacccgcctcctcagatcctcatcaaaaacacacctgtacctgcggatcctccaacggccttccggaaggacaagctgaactctttcatcacccagtattctactggccaagtcagcgtggagatcgagtgggagctgcagaaggaaaacagcaagcgctggaacccggagatccagtacacttccaactattacaagtctaataatgttgaatttgctgttaatactgaaggtgtatatagtgaaccccgccccattggcaccagatacctgactcgtaatctg

SEQ ID NO: 122 - protein, 736 aa, synthetic construct
  REGION 1..736: note = Adeno Associated Virus Capsid Protein Variant
MAADGYLPDWLEDNLSEGIREWWALKPGAPQPKANQQHQDNARGLVLPGYKYLGPGNGLDKGEPVNAADAAALEHDKAYDQQLKAGDNPYLKYNHADAEFQERLKEDTSFGGNLGRAVFQAKKRLLEPLGLVEEAAKTAPGKKRPVEQSPQEPDSSAGIGKSGAQPAKKRLNFGQTGDTESVPDPQPIGEPPAAPSGVGSLTMASGGGAPVADNNEGADGVGSSSGNWHCDSQWLGDRVITTSTRTWALPTYNNHLYKQISNSTSGGSSNDNAYFGYSTPWGYFDFNRFHCHFSPRDWQRLINNNWGFRPKRLNFKLFNIQVKEVTDNNGVKTIANNLTSTVQVFTDSDYQLPYVLGSAHEGCLPPFPADVFMIPQYGYLTLNDGSQAVGRSSFYCLEYFPSQMLRTGNNFQFSYEFENVPFHSSYAHSQSLDRLMNPLIDQYLYYLSKTINGSGQNQQTLKFSVAGPSNMAVQGRNYIPGPSYRQQRVSTTVTQNNNSEFAWPGASSWALNGRNSLMNPGPAMASHKEGEDRFFPLSGSLIFGKQGTGRDNVDADKVMITNEEEIKTTNPVATESYGQVATNHQSAQAQAQTGWVQNQGILPGMVWQDRDVYLQGPIWAKIPHTDGNFHPSPLMGGFGMKHPPPQILIKNTPVPADPPTAFRKDKLNSFITQYSTGQVSVEIEWELQKENSKRWNPEIQYTSNYYKSNNVEFAVNTEGVYSEPRPIGTRYLTRNL

SEQ ID NO: 123 - DNA, 2208 bp, synthetic construct
  misc_feature 1..2208: note = Adeno Associated Virus Capsid Protein Variant
  source 1..2208: mol_type = other DNA
atggctgccgatggttatcttccagattggctcgaggacaaccttagtgaaggaattcgcgagtggtgggctttgaaacctggagcccctcaacccaaggcaaatcaacaacatcaagacaacgctcgaggtcttgtgcttccgggttacaaataccttggacccggcaacggactcgacaagggggagccggtcaacgcagcagacgcggcggccctcgagcacgacaaggcctacgaccagcagctcaaggccggagacaacccgtacctcaagtacaaccacgccgacgccgagttccaggagcggctcaaagaagatacgtcttttgggggcaacctcgggcgagcagtcttccaggccaaaaagaggcttcttgaacctcttggtctggttgaggaagcggctaagacggctcctggaaagaagaggcctgtagagcagtctcctcaggaaccggactcctccgcgggtattggcaaatcgggtgcacagcccgctaaaaagagactcaatttcggtcagactggcgacacagagtcagtcccagaccctcaaccaatcggagaacctcccgcagccccctcaggtgtgggatctcttacaatggcttcaggtggtggcgcaccagtggcagacaataacgaaggtgccgatggagtgggtagttcctcgggaaattggcattgcgattcccaatggctgggggacagagtcatcaccaccagcacccgaacctgggccctgcccacctacaacaatcacctctacaagcaaatctccaacagcacatctggaggatcttcaaatgacaacgcctacttcggctacagcaccccctgggggtattttgacttcaacagattccactgccacttctcaccacgtgactggcagcgactcatcaacaacaactggggattccggcctaagcgactcaacttcaagctcttcaacattcaggtcaaagaggttacggacaacaatggagtcaagaccatcgccaataaccttaccagcacggtccaggtcttcacggactcagactatcagctcccgtacgtgctcgggtcggctcacgagggctgcctcccgccgttcccagcggacgttttcatgattcctcagtacgggtatctgacgcttaatgatggaagccaggccgtgggtcgttcgtccttttactgcctggaatatttcccgtcgcaaatgctaagaacgggtaacaacttccagttcagctacgagtttgagaacgtacctttccatagcagctacgctcacagccaaagcctggaccgactaatgaatccactcatcgaccaatacttgtactatctctcaaagactattaacttttctggacagaatcaacaaacgctaaaattcagtgtggccggacccagcaacatggctgtccagggaagaaactacatacctggacccagctaccgacaacaacgtgtctcaaccactgtgactcaaaacaacaacagcgaatttgcttggcctggagcttcttcttgggctctcaatggacgtaatagcttgatgaatcctggacctgctatggccagccacaaagaaggagaggaccgtttctttcctttgtctggatctttaatttttggcaaacaaggaactggaagagacaacgtggatgcggacaaagtcatgataaccaacgaagaagaaattaaaactactaacccggtagcaacggagtcctatggacaagtggccacaaaccaccagagtgcccaagcacaggcgcagaccggctgggttcaaaaccaaggaatacttccgggtatggtttggcaggacagagatgtgtacctgcaaggacccatttgggccaaaattcctcacacggacggcaactttcacccttctccgctgatgggagggtttggaatgaagcacccgcctcctcagatcctcatcaaaaacacacctgtacctgcggatcctccaacggccttcaacaaggacaagctgaactctttcatcacccagtattctactggccaagtcagcgtggagatcgagtgggagctgcagaaggaaaacagcaagcgctggaacccggagatccagtacacttccaactattacaagtctaataatgttgaatttgctgttaatactgaaggtgtatatagtgaaccccgccccattggcaccagatacctgactcgtaatctg

SEQ ID NO: 124 - protein, 736 aa, synthetic construct
  REGION 1..736: note = Adeno Associated Virus Capsid Protein Variant
MAADGYLPDWLEDNLSEGIREWWALKPGAPQPKANQQHQDNARGLVLPGYKYLGPGNGLDKGEPVNAADAAALEHDKAYDQQLKAGDNPYLKYNHADAEFQERLKEDTSFGGNLGRAVFQAKKRLLEPLGLVEEAAKTAPGKKRPVEQSPQEPDSSAGIGKSGAQPAKKRLNFGQTGDTESVPDPQPIGEPPAAPSGVGSLTMASGGGAPVADNNEGADGVGSSSGNWHCDSQWLGDRVITTSTRTWALPTYNNHLYKQISNSTSGGSSNDNAYFGYSTPWGYFDFNRFHCHFSPRDWQRLINNNWGFRPKRLNFKLFNIQVKEVTDNNGVKTIANNLTSTVQVFTDSDYQLPYVLGSAHEGCLPPFPADVFMIPQYGYLTLNDGSQAVGRSSFYCLEYFPSQMLRTGNNFQFSYEFENVPFHSSYAHSQSLDRLMNPLIDQYLYYLSKTINFSGQNQQTLKFSVAGPSNMAVQGRNYIPGPSYRQQRVSTTVTQNNNSEFAWPGASSWALNGRNSLMNPGPAMASHKEGEDRFFPLSGSLIFGKQGTGRDNVDADKVMITNEEEIKTTNPVATESYGQVATNHQSAQAQAQTGWVQNQGILPGMVWQDRDVYLQGPIWAKIPHTDGNFHPSPLMGGFGMKHPPPQILIKNTPVPADPPTAFNKDKLNSFITQYSTGQVSVEIEWELQKENSKRWNPEIQYTSNYYKSNNVEFAVNTEGVYSEPRPIGTRYLTRNL

SEQ ID NO: 125 - DNA, 2208 bp, synthetic construct
  misc_feature 1..2208: note = Adeno Associated Virus Capsid Protein Variant
  source 1..2208: mol_type = other DNA
atggctgccgatggttatcttccagattggctcgaggacaaccttagtgaaggaattcgcgagtggtgggctttgaaacctggagcccctcaacccaaggcaaatcaacaacatcaagacaacgctcgaggtcttgtgcttccgggttacaaataccttggacccggcaacggactcgacaagggggagccggtcaacgcagcagacgcggcggccctcgagcacgacaaggcctacgaccagcagctcaaggccggagacaacccgtacctcaagtacaaccacgccgacgccgagttccaggagcggctcaaagaagatacgtcttttgggggcaacctcgggcgagcagtcttccaggccaaaaagaggcttcttgaacctcttggtctggttgaggaagcggctaagacggctcctggaaagaagaggcctgtagagcagtctcctcaggaaccggactcctccgcgggtattggcaaatcgggtgcacagcccgctaaaaagagactcaatttcggtcagactggcgacacagagtcagtcccagaccctcaaccaatcggagaacctcccgcagccccctcaggtgtgggatctcttacaatggcttcaggtggtggcgcaccagtggcagacaataacgaaggtgccgatggagtgggtagttcctcgggaaattggcattgcgattcccaatggctgggggacagagtcatcaccaccagcacccgaacctgggccctgcccacctacaacaatcacctctacaagcaaatctccaacagcacatctggaggatcttcaaatgacaacgcctacttcggctacagcaccccctgggggtattttgacttcaacagattccactgccacttctcaccacgtgactggcagcgactcatcaacaacaactggggattccggcctaagcgactcaacttcaagctcttcaacattcaggtcaaagaggttacggacaacaatggagtcaagaccatcgccaataaccttaccagcacggtccaggtcttcacggactcagactatcagctcccgtacgtgctcgggtcggctcacgagggctgcctcccgccgttcccagcggacgttttcatgattcctcagtacgggtatctgacgcttaatgatggaagccaggccgtgggtcgttcgtccttttactgcctggaatatttcccgtcgcaaatgctaagaacgggtaacaacttccagttcagctacgagtttgagaacgtacctttccatagcagctacgctcacagccaaagcctggaccgactaatgaatccactcatcgaccaatacttgtactatctctcaaagactattaacggttctggacagaatcaacaaacgctaaaattcagtgtggccggacccagcaacatggctgtccagggaagaaactacatacctggacccagctaccgacaacaacgtgtctcaaccactgtgactcaaaacaacaacagcgaatttgcttggcctggagcttcttcttgggctctcaatggacgtaatagcttgatgaatcctggacctgctatggccagccacaaagaaggagaggaccgtttctttcctttgtctggatctttaatttttggcaaacaaggaactggaagagacaacgtggatgcggacaaagtcatgataaccaacgaagaagaaattaaaactactaacccggtagcaacggagtcctatggacaagtggccacaaaccaccagagtgcccaagcacaggcgcagaccggctgggttcaaaaccaaggaatacttccgggtatggtttggcaggacagagatgtgtacctgcaaggacccatttgggccaaaattcctcacacggacggcaactttcacccttctccgctgatgggagggtttggaatgaagcacccgcctcctcagatcctcatcaaaaacacacctgtacctgcggatcctccaacggccttcaacaagaggaagctgaactctttcatcacccagtattctactggccaagtcagcgtggagatcgagtgggagctgcagaaggaaaacagcaagcgctggaacccggagatccagtacacttccaactattacaagtctaataatgttgaatttgctgttaatactgaaggtgtatatagtgaaccccgccccattggcaccagatacctgactcgtaatctg

SEQ ID NO: 126 - protein, 736 aa, synthetic construct
  REGION 1..736: note = Adeno Associated Virus Capsid Protein Variant
MAADGYLPDWLEDNLSEGIREWWALKPGAPQPKANQQHQDNARGLVLPGYKYLGPGNGLDKGEPVNAADAAALEHDKAYDQQLKAGDNPYLKYNHADAEFQERLKEDTSFGGNLGRAVFQAKKRLLEPLGLVEEAAKTAPGKKRPVEQSPQEPDSSAGIGKSGAQPAKKRLNFGQTGDTESVPDPQPIGEPPAAPSGVGSLTMASGGGAPVADNNEGADGVGSSSGNWHCDSQWLGDRVITTSTRTWALPTYNNHLYKQISNSTSGGSSNDNAYFGYSTPWGYFDFNRFHCHFSPRDWQRLINNNWGFRPKRLNFKLFNIQVKEVTDNNGVKTIANNLTSTVQVFTDSDYQLPYVLGSAHEGCLPPFPADVFMIPQYGYLTLNDGSQAVGRSSFYCLEYFPSQMLRTGNNFQFSYEFENVPFHSSYAHSQSLDRLMNPLIDQYLYYLSKTINGSGQNQQTLKFSVAGPSNMAVQGRNYIPGPSYRQQRVSTTVTQNNNSEFAWPGASSWALNGRNSLMNPGPAMASHKEGEDRFFPLSGSLIFGKQGTGRDNVDADKVMITNEEEIKTTNPVATESYGQVATNHQSAQAQAQTGWVQNQGILPGMVWQDRDVYLQGPIWAKIPHTDGNFHPSPLMGGFGMKHPPPQILIKNTPVPADPPTAFNKRKLNSFITQYSTGQVSVEIEWELQKENSKRWNPEIQYTSNYYKSNNVEFAVNTEGVYSEPRPIGTRYLTRNL

SEQ ID NO: 127 - DNA, 2208 bp, synthetic construct
  misc_feature 1..2208: note = Adeno Associated Virus Capsid Protein Variant
  source 1..2208: mol_type = other DNA
atggctgccgatggttatcttccagattggctcgaggacaaccttagtgaaggaattcgcgagtggtgggctttgaaacctggagcccctcaacccaaggcaaatcaacaacatcaagacaacgctcgaggtcttgtgcttccgggttacaaataccttggacccggcaacggactcgacaagggggagccggtcaacgcagcagacgcggcggccctcgagcacgacaaggcctacgaccagcagctcaaggccggagacaacccgtacctcaagtacaaccacgccgacgccgagttccaggagcggctcaaagaagatacgtcttttgggggcaacctcgggcgagcagtcttccaggccaaaaagaggcttcttgaacctcttggtctggttgaggaagcggctaagacggctcctggaaagaagaggcctgtagagcagtctcctcaggaaccggactcctccgcgggtattggcaaatcgggtgcacagcccgctaaaaagagactcaatttcggtcagactggcgacacagagtcagtcccagaccctcaaccaatcggagaacctcccgcagccccctcaggtgtgggatctcttacaatggcttcaggtggtggcgcaccagtggcagacaataacgaaggtgccgatggagtgggtagttcctcgggaaattggcattgcgattcccaatggctgggggacagagtcatcaccaccagcacccgaacctgggccctgcccacctacaacaatcacctctacaagcaaatctccaacagcacatctggaggatcttcaaatgacaacgcctacttcggctacagcaccccctgggggtattttgacttcaacagattccactgccacttctcaccacgtgactggcagcgactcatcaacaacaactggggattccggcctaagcgactcaacttcaagctcttcaacattcaggtcaaagaggttacggacaacaatggagtcaagaccatcgccaataaccttaccagcacggtccaggtcttcacggactcagactatcagctcccgtacgtgctcgggtcggctcacgagggctgcctcccgccgttcccagcggacgttttcatgattcctcagtacgggtatctgacgcttaatgatggaagccaggccgtgggtcgttcgtccttttactgcctggaatatttcccgtcgcaaatgctaagaacgggtaacaacttccagttcagctacgagtttgagaacgtacctttccatagcagctacgctcacagccaaagcctggaccgactaatgaatccactcatcgaccaatacttgtactatctctcaaagactattaacggttctggacagaatcaacaaacgctaaaattcagtgtggccggacccagcaacatggctgtccagggaagaaactacatacctggacccagctaccgacaacaacgtgtctcaaccactgtgactcaaaacaacaacagcgaatttgcttggcctggagcttcttcttgggctctcaatggacgtaatagcttgatgaatcctggacctgctatggccagccacaaagaaggagaggaccgtttctttcctttgtctggatctttaatttttggcaaacaaggaactggaagagacaacgtgattgcggacaaagtcatgataaccaacgaagaagaaattaaaactactaacccggtagcaacggagtcctatggacaagtggccacaaaccaccagagtgcccaagcacaggcgcagaccggctgggttcaaaaccaaggaatacttccgggtatggtttggcaggacagagatgtgtacctgcaaggacccatttgggccaaaattcctcacacggacggcaactttcacccttctccgctgatgggagggtttggaatgaagcacccgcctcctcagatcctcatcaaaaacacacctgtacctgcggatcctccaacggccttcaacaaggacaagctgaactctttcatcacccagtattctactggccaagtcagcgtggagatcgagtgggagctgcagaaggaaaacagcaagcgctggaacccggagatccagtacacttccaactattacaagtctaataatgttgaatttgctgttaatactgaaggtgtatatagtgaaccccgccccattggcaccagatacctgactcgtaatctg

SEQ ID NO: 128 - protein, 736 aa, synthetic construct
  REGION 1..736: note = Adeno Associated Virus Capsid Protein Variant
MAADGYLPDWLEDNLSEGIREWWALKPGAPQPKANQQHQDNARGLVLPGYKYLGPGNGLDKGEPVNAADAAALEHDKAYDQQLKAGDNPYLKYNHADAEFQERLKEDTSFGGNLGRAVFQAKKRLLEPLGLVEEAAKTAPGKKRPVEQSPQEPDSSAGIGKSGAQPAKKRLNFGQTGDTESVPDPQPIGEPPAAPSGVGSLTMASGGGAPVADNNEGADGVGSSSGNWHCDSQWLGDRVITTSTRTWALPTYNNHLYKQISNSTSGGSSNDNAYFGYSTPWGYFDFNRFHCHFSPRDWQRLINNNWGFRPKRLNFKLFNIQVKEVTDNNGVKTIANNLTSTVQVFTDSDYQLPYVLGSAHEGCLPPFPADVFMIPQYGYLTLNDGSQAVGRSSFYCLEYFPSQMLRTGNNFQFSYEFENVPFHSSYAHSQSLDRLMNPLIDQYLYYLSKTINGSGQNQQTLKFSVAGPSNMAVQGRNYIPGPSYRQQRVSTTVTQNNNSEFAWPGASSWALNGRNSLMNPGPAMASHKEGEDRFFPLSGSLIFGKQGTGRDNVIADKVMITNEEEIKTTNPVATESYGQVATNHQSAQAQAQTGWVQNQGILPGMVWQDRDVYLQGPIWAKIPHTDGNFHPSPLMGGFGMKHPPPQILIKNTPVPADPPTAFNKDKLNSFITQYSTGQVSVEIEWELQKENSKRWNPEIQYTSNYYKSNNVEFAVNTEGVYSEPRPIGTRYLTRNL

SEQ ID NO: 129 - DNA, 2208 bp, synthetic construct
  misc_feature 1..2208: note = Adeno Associated Virus Capsid Protein Variant
  source 1..2208: mol_type = other DNA
atggctgccgatggttatcttccagattggctcgaggacaaccttagtgaaggaattcgcgagtggtgggctttgaaacctggagcccctcaacccaaggcaaatcaacaacatcaagacaacgctcgaggtcttgtgcttccgggttacaaataccttggacccggcaacggactcgacaagggggagccggtcaacgcagcagacgcggcggccctcgagcacgacaaggcctacgaccagcagctcaaggccggagacaacccgtacctcaagtacaaccacgccgacgccgagttccaggagcggctcaaagaagatacgtcttttgggggcaacctcgggcgagcagtcttccaggccaaaaagaggcttcttgaacctcttggtctggttgaggaagcggctaagacggctcctggaaagaagaggcctgtagagcagtctcctcaggaaccggactcctccgcgggtattggcaaatcgggtgcacagcccgctaaaaagagactcaatttcggtcagactggcgacacagagtcagtcccagaccctcaaccaatcggagaacctcccgcagccccctcaggtgtgggatctcttacaatggcttcaggtggtggcgcaccagtggcagacaataacgaaggtgccgatggagtgggtagttcctcgggaaattggcattgcgattcccaatggctgggggacagagtcatcaccaccagcacccgaacctgggccctgcccacctacaacaatcacctctacaagcaaatctccaacagcacatctggaggatcttcaaatgacaacgcctacttcggctacagcaccccctgggggtattttgacttcaacagattccactgccacttctcaccacgtgactggcagcgactcatcaacaacaactggggattccggcctaagcgactcaacttcaagctcttcaacattcaggtcaaagaggttacggacaacaatggagtcaagaccatcgccaataaccttaccagcacggtccaggtcttcacggactcagactatcagctcccgtacgtgctcgggtcggctcacgagggctgcctcccgccgttcccagcggacgttttcatgattcctcagtacgggtatctgacgcttaatgatggaagccaggccgtgggtcgttcgtccttttactgcctggaatatttcccgtcgcaaatgctaagaacgggtaacaacttccagttcagctacgagtttgagaacgtacctttccatagcagctacgctcacagccaaagcctggaccgactaatgaatccactcatcgaccaatacttgtactatctctcaaagactattaacggtcggggacagaatcaacaaacgctaaaattcagtgtggccggacccagcaacatggctgtccagggaagaaactacatacctggacccagctaccgacaacaacgtgtctcaaccactgtgactcaaaacaacaacagcgaatttgcttggcctggagcttcttcttgggctctcaatggacgtaatagcttgatgaatcctggacctgctatggccagccacaaagaaggagaggaccgtttctttcctttgtctggatctttaatttttggcaaacaaggaactggaagagacaacgtggatgcggacaaagtcatgataaccaacgaagaagaaattaaaactactaacccggtagcaacggagtcctatggacaagtggccacaaaccaccagagtgcccaagcacaggcgcagaccggctgggttcaaaaccaaggaatacttccgggtatggtttggcaggacagagatgtgtacctgcaaggacccatttgggccaaaattcctcacacggacggcaactttcacccttctccgctgatgggagggtttggaatgaagcacccgcctcctcagatcctcatcaaaaacacacctgtacctgcggatcctccaacggccttcaacaaggacaagctgaactctttcatcacccagtattctactggccaagtcagcgtggagatcgagtgggagctgcagaaggaaaacagcaagcgctggaacccggagatccagtacacttccaactattacaagtctaataatgttgaatttgctgttaatactgaaggtgtatatagtgaaccccgccccattggcaccagatacctgactcgtaatctg

SEQ ID NO: 130 - protein, 736 aa, synthetic construct
  REGION 1..736: note = Adeno Associated Virus Capsid Protein Variant
MAADGYLPDWLEDNLSEGIREWWALKPGAPQPKANQQHQDNARGLVLPGYKYLGPGNGLDKGEPVNAADAAALEHDKAYDQQLKAGDNPYLKYNHADAEFQERLKEDTSFGGNLGRAVFQAKKRLLEPLGLVEEAAKTAPGKKRPVEQSPQEPDSSAGIGKSGAQPAKKRLNFGQTGDTESVPDPQPIGEPPAAPSGVGSLTMASGGGAPVADNNEGADGVGSSSGNWHCDSQWLGDRVITTSTRTWALPTYNNHLYKQISNSTSGGSSNDNAYFGYSTPWGYFDFNRFHCHFSPRDWQRLINNNWGFRPKRLNFKLFNIQVKEVTDNNGVKTIANNLTSTVQVFTDSDYQLPYVLGSAHEGCLPPFPADVFMIPQYGYLTLNDGSQAVGRSSFYCLEYFPSQMLRTGNNFQFSYEFENVPFHSSYAHSQSLDRLMNPLIDQYLYYLSKTINGRGQNQQTLKFSVAGPSNMAVQGRNYIPGPSYRQQRVSTTVTQNNNSEFAWPGASSWALNGRNSLMNPGPAMASHKEGEDRFFPLSGSLIFGKQGTGRDNVDADKVMITNEEEIKTTNPVATESYGQVATNHQSAQAQAQTGWVQNQGILPGMVWQDRDVYLQGPIWAKIPHTDGNFHPSPLMGGFGMKHPPPQILIKNTPVPADPPTAFNKDKLNSFITQYSTGQVSVEIEWELQKENSKRWNPEIQYTSNYYKSNNVEFAVNTEGVYSEPRPIGTRYLTRNL

SEQ ID NO: 131 - DNA, 2208 bp, synthetic construct
  misc_feature 1..2208: note = Adeno Associated Virus Capsid Protein Variant
  source 1..2208: mol_type = other DNA
atggctgccgatggttatcttccagattggctcgaggacaaccttagtgaaggaattcgcgagtggtgggctttgaaacctggagcccctcaacccaaggcaaatcaacaacatcaagacaacgctcgaggtcttgtgcttccgggttacaaataccttggacccggcaacggactcgacaagggggagccggtcaacgcagcagacgcggcggccctcgagcacgacaaggcctacgaccagcagctcaaggccggagacaacccgtacctcaagtacaaccacgccgacgccgagttccaggagcggctcaaagaagatacgtcttttgggggcaacctcgggcgagcagtcttccaggccaaaaagaggcttcttgaacctcttggtctggttgaggaagcggctaagacggctcctggaaagaagaggcctgtagagcagtctcctcaggaaccggactcctccgcgggtattggcaaatcgggtgcacagcccgctaaaaagagactcaatttcggtcagactggcgacacagagtcagtcccagaccctcaaccaatcggagaacctcccgcagccccctcaggtgtgggatctcttacaatggcttcaggtggtggcgcaccagtggcagacaataacgaaggtgccgatggagtgggtagttcctcgggaaattggcattgcgattcccaatggctgggggacagagtcatcaccaccagcacccgaacctgggccctgcccacctacaacaatcacctctacaagcaaatctccaacagcacatctggaggatcttcaaatgacaacgcctacttcggctacagcaccccctgggggtattttgacttcaacagattccactgccacttctcaccacgtgactggcagcgactcatcaacaacaactggggattccggcctaagcgactcaacttcaagctcttcaacattcaggtcaaagaggttacggacaacaatggagtcaagaccatcgccaataaccttaccagcacggtccaggtcttcacggactcagactatcagctcccgtacgtgctcgggtcggctcacgagggctgcctcccgccgttcccagcggacgttttcatgattcctcagtacgggtatctgacgcttaatgatggaagccaggccgtgggtcgttcgtccttttactgcctggaatatttcccgtcgcaaatgctaagaacgggtaacaacttccagttcagctacgagtttgagaacgtacctttccatagcagctacgctcacagccaaagcctggaccgactaatgaatccactcatcgaccaatacttgtactatctctcaaagactattaacggttctggacagaatcaacaaacgctaaaattcagtgtggccggacccagcaacatggctgtccagggaagaaactacatacctggacccagctaccgacaacaacgtgtctcaaccactgtgactcaaaacaacaacagcgaatttgcttggcctggagcttcttcttgggctctcaatggacgtaatagcttgatgaatcctggacctgctatggccagccacaaagaaggagaggaccgtttctttcctttgtctggatctttaatttttggcaaacaaggaactggaagagacaacgtgagtgcggacaaagtcatgataaccaacgaagaagaaattaaaactactaacccggtagcaacggagtcctatggacaagtggccacaaaccaccagagtgcccaagcacaggcgcagaccggctgggttcaaaaccaaggaatacttccgggtatggtttggcaggacagagatgtgtacctgcaaggacccatttgggccaaaattcctcacacggacggcaactttcacccttctccgctgatgggagggtttggaatgaagcacccgcctcctcagatcctcatcaaaaacacacctgtacctgcggatcctccaacggccttcaacaaggacaagctgaactctttcatcacccagtattctactggccaagtcagcgtggagatcgagtgggagctgcagaaggaaaacagcaagcgctggaacccggagatccagtacacttccaactattacaagtctaataatgttgaatttgctgttaatactgaaggtgtatatagtgaaccccgccccattggcaccagatacctgactcgtaatctg

SEQ ID NO: 132 - protein, 736 aa, synthetic construct
  REGION 1..736: note = Adeno Associated Virus Capsid Protein Variant
MAADGYLPDWLEDNLSEGIREWWALKPGAPQPKANQQHQDNARGLVLPGYKYLGPGNGLDKGEPVNAADAAALEHDKAYDQQLKAGDNPYLKYNHADAEFQERLKEDTSFGGNLGRAVFQAKKRLLEPLGLVEEAAKTAPGKKRPVEQSPQEPDSSAGIGKSGAQPAKKRLNFGQTGDTESVPDPQPIGEPPAAPSGVGSLTMASGGGAPVADNNEGADGVGSSSGNWHCDSQWLGDRVITTSTRTWALPTYNNHLYKQISNSTSGGSSNDNAYFGYSTPWGYFDFNRFHCHFSPRDWQRLINNNWGFRPKRLNFKLFNIQVKEVTDNNGVKTIANNLTSTVQVFTDSDYQLPYVLGSAHEGCLPPFPADVFMIPQYGYLTLNDGSQAVGRSSFYCLEYFPSQMLRTGNNFQFSYEFENVPFHSSYAHSQSLDRLMNPLIDQYLYYLSKTINGSGQNQQTLKFSVAGPSNMAVQGRNYIPGPSYRQQRVSTTVTQNNNSEFAWPGASSWALNGRNSLMNPGPAMASHKEGEDRFFPLSGSLIFGKQGTGRDNVSADKVMITNEEEIKTTNPVATESYGQVATNHQSAQAQAQTGWVQNQGILPGMVWQDRDVYLQGPIWAKIPHTDGNFHPSPLMGGFGMKHPPPQILIKNTPVPADPPTAFNKDKLNSFITQYSTGQVSVEIEWELQKENSKRWNPEIQYTSNYYKSNNVEFAVNTEGVYSEPRPIGTRYLTRNL

SEQ ID NO: 133 - DNA, 2208 bp, synthetic construct
  misc_feature 1..2208: note = Adeno Associated Virus Capsid Protein Variant
  source 1..2208: mol_type = other DNA
atggctgccgatggttatcttccagattggctcgaggacaaccttagtgaaggaattcgcgagtggtgggctttgaaacctggagcccctcaacccaaggcaaatcaacaacatcaagacaacgctcgaggtcttgtgcttccgggttacaaataccttggacccggcaacggactcgacaagggggagccggtcaacgcagcagacgcggcggccctcgagcacgacaaggcctacgaccagcagctcaaggccggagacaacccgtacctcaagtacaaccacgccgacgccgagttccaggagcggctcaaagaagatacgtcttttgggggcaacctcgggcgagcagtcttccaggccaaaaagaggcttcttgaacctcttggtctggttgaggaagcggctaagacggctcctggaaagaagaggcctgtagagcagtctcctcaggaaccggactcctccgcgggtattggcaaatcgggtgcacagcccgctaaaaagagactcaatttcggtcagactggcgacacagagtcagtcccagaccctcaaccaatcggagaacctcccgcagccccctcaggtgtgggatctcttacaatggcttcaggtggtggcgcaccagtggcagacaataacgaaggtgccgatggagtgggtagttcctcgggaaattggcattgcgattcccaatggctgggggacagagtcatcaccaccagcacccgaacctgggccctgcccacctacaacaatcacctctacaagcaaatctccaacagcacatctggaggatcttcaaatgacaacgcctacttcggctacagcaccccctgggggtattttgacttcaacagattccactgccacttctcaccacgtgactggcagcgactcatcaacaacaactggggattccggcctaagcgactcaacttcaagctcttcaacattcaggtcaaagaggttacggacaacaatggagtcaagaccatcgccaataaccttaccagcacggtccaggtcttcacggactcagactatcagctcccgtacgtgctcgggtcggctcacgagggctgcctcccgccgttcccagcggacgttttcatgattcctcagtacgggtatctgacgcttaatgatggaagccaggccgtgggtcgttcgtccttttactgcctggaatatttcccgtcgcaaatgctaagaacgggtaacaacttccagttcagctacgagtttgagaacgtacctttccatagcagctacgctcacagccaaagcctggaccgactaatgaatccactcatcgaccaatacttgtactatctctcaaagactattaacggttctggacagaatcaacaaacgctaaaattcagtgtggccggacccagcaacatggctgtccagggaagaaactacatacctggacccagctaccgacaacaacgtgtctcaaccactgtgactcaaaacaacaacagcgaatttgcttggcctggagcttcttcttgggctctcaatggacgtaatagcttgatgaatcctggacctgctatggccagccacaaagaaggagaggaccgtttctttcctttgtctggatctttaatttttggcaaacaaggaactggaagagacaacgtggatgcggacaaagtcatgataaccaacgaagaagaaattaaaactactaacccggtagcaacggagtcctatggacaagtggccacaaaccaccagagtgcccaagcacaggcgcagaccggctgggttcaaaaccaaggaatacttccgggtatggtttggcaggacagagatgtgtacctgcaaggacccatttgggccaaaattcctcacacggacggcaactttcacccttctccgctgatgggagggtttggaatgaagcacccgcctcctcagatcctcatcaaaaacacacctgtacctgcggatcctccaggtgccttcaacaaggacaagctgaactctttcatcacccagtattctactggccaagtcagcgtggagatcgagtgggagctgcagaaggaaaacagcaagcgctggaacccggagatccagtacacttccaactattacaagtctaataatgttgaatttgctgttaatactgaaggtgtatatagtgaaccccgccccattggcaccagatacctgactcgtaatctg

SEQ ID NO: 134 - protein, 736 aa, synthetic construct
  REGION 1..736: note = Adeno Associated Virus Capsid Protein Variant
MAADGYLPDWLEDNLSEGIREWWALKPGAPQPKANQQHQDNARGLVLPGYKYLGPGNGLDKGEPVNAADAAALEHDKAYDQQLKAGDNPYLKYNHADAEFQERLKEDTSFGGNLGRAVFQAKKRLLEPLGLVEEAAKTAPGKKRPVEQSPQEPDSSAGIGKSGAQPAKKRLNFGQTGDTESVPDPQPIGEPPAAPSGVGSLTMASGGGAPVADNNEGADGVGSSSGNWHCDSQWLGDRVITTSTRTWALPTYNNHLYKQISNSTSGGSSNDNAYFGYSTPWGYFDFNRFHCHFSPRDWQRLINNNWGFRPKRLNFKLFNIQVKEVTDNNGVKTIANNLTSTVQVFTDSDYQLPYVLGSAHEGCLPPFPADVFMIPQYGYLTLNDGSQAVGRSSFYCLEYFPSQMLRTGNNFQFSYEFENVPFHSSYAHSQSLDRLMNPLIDQYLYYLSKTINGSGQNQQTLKFSVAGPSNMAVQGRNYIPGPSYRQQRVSTTVTQNNNSEFAWPGASSWALNGRNSLMNPGPAMASHKEGEDRFFPLSGSLIFGKQGTGRDNVDADKVMITNEEEIKTTNPVATESYGQVATNHQSAQAQAQTGWVQNQGILPGMVWQDRDVYLQGPIWAKIPHTDGNFHPSPLMGGFGMKHPPPQILIKNTPVPADPPGAFNKDKLNSFITQYSTGQVSVEIEWELQKENSKRWNPEIQYTSNYYKSNNVEFAVNTEGVYSEPRPIGTRYLTRNL

SEQ ID NO: 135 - DNA, 2208 bp, synthetic construct
  misc_feature 1..2208: note = Adeno Associated Virus Capsid Protein Variant
  source 1..2208: mol_type = other DNA
atggctgccgatggttatcttccagattggctcgaggacaaccttagtgaaggaattcgcgagtggtgggctttgaaacctggagcccctcaacccaaggcaaatcaacaacatcaagacaacgctcgaggtcttgtgcttccgggttacaaataccttggacccggcaacggactcgacaagggggagccggtcaacgcagcagacgcggcggccctcgagcacgacaaggcctacgaccagcagctcaaggccggagacaacccgtacctcaagtacaaccacgccgacgccgagttccaggagcggctcaaagaagatacgtcttttgggggcaacctcgggcgagcagtcttccaggccaaaaagaggcttcttgaacctcttggtctggttgaggaagcggctaagacggctcctggaaagaagaggcctgtagagcagtctcctcaggaaccggactcctccgcgggtattggcaaatcgggtgcacagcccgctaaaaagagactcaatttcggtcagactggcgacacagagtcagtcccagaccctcaaccaatcggagaacctcccgcagccccctcaggtgtgggatctcttacaatggcttcaggtggtggcgcaccagtggcagacaataacgaaggtgccgatggagtgggtagttcctcgggaaattggcattgcgattcccaatggctgggggacagagtcatcaccaccagcacccgaacctgggccctgcccacctacaacaatcacctctacaagcaaatctccaacagcacatctggaggatcttcaaatgacaacgcctacttcggctacagcaccccctgggggtattttgacttcaacagattccactgccacttctcaccacgtgactggcagcgactcatcaacaacaactggggattccggcctaagcgactcaacttcaagctcttcaacattcaggtcaaagaggttacggacaacaatggagtcaagaccatcgccaataaccttaccagcacggtccaggtcttcacggactcagactatcagctcccgtacgtgctcgggtcggctcacgagggctgcctcccgccgttcccagcggacgttttcatgattcctcagtacgggtatctgacgcttaatgatggaagccaggccgtgggtcgttcgtccttttactgcctggaatatttcccgtcgcaaatgctaagaacgggtaacaacttccagttcagctacgagtttgagaacgtacctttccatagcagctacgctcacagccaaagcctggaccgactaatgaatccactcatcgaccaatacttgtactatctctcaaagactattaacggttctggacagaatcaacaaacgctaaaattcagtgtggccggacccagcaacatggctgtccagggaagaaactacatacctggacccagctaccgacaacaacgtgtctcaaccactgtgactcaaaacaacaacagcgaaaatgcttggcctggagcttcttcttgggctctcaatggacgtaatagcttgatgaatcctggacctgctatggccagccacaaagaaggagaggaccgtttctttcctttgtctggatctttaatttttggcaaacaaggaactggaagagacaacgtggatgcggacaaagtcatgataaccaacgaagaagaaattaaaactactaacccggtagcaacggagtcctatggacaagtggccacaaaccaccagagtgcccaagcacaggcgcagaccggctgggttcaaaaccaaggaatacttccgggtatggtttggcaggacagagatgtgtacctgcaaggacccatttgggccaaaattcctcacacggacggcaactttcacccttctccgctgatgggagggtttggaatgaagcacccgcctcctcagatcctcatcaaaaacacacctgtacctgcggatcctccaacggccttcaacaaggacaagctgaactctttcatcacccagtattctactggccaagtcagcgtggagatcgagtgggagctgcagaaggaaaacagcaagcgctggaacccggagatccagtacacttccaactattacaagtctaataatgttgaatttgctgttaatactgaaggtgtatatagtgaaccccgccccattggcaccagatacctgactcgtaatctg

SEQ ID NO: 136 - protein, 736 aa, synthetic construct
  REGION 1..736: note = Adeno Associated Virus Capsid Protein Variant
MAADGYLPDWLEDNLSEGIREWWALKPGAPQPKANQQHQDNARGLVLPGYKYLGPGNGLDKGEPVNAADAAALEHDKAYDQQLKAGDNPYLKYNHADAEFQERLKEDTSFGGNLGRAVFQAKKRLLEPLGLVEEAAKTAPGKKRPVEQSPQEPDSSAGIGKSGAQPAKKRLNFGQTGDTESVPDPQPIGEPPAAPSGVGSLTMASGGGAPVADNNEGADGVGSSSGNWHCDSQWLGDRVITTSTRTWALPTYNNHLYKQISNSTSGGSSNDNAYFGYSTPWGYFDFNRFHCHFSPRDWQRLINNNWGFRPKRLNFKLFNIQVKEVTDNNGVKTIANNLTSTVQVFTDSDYQLPYVLGSAHEGCLPPFPADVFMIPQYGYLTLNDGSQAVGRSSFYCLEYFPSQMLRTGNNFQFSYEFENVPFHSSYAHSQSLDRLMNPLIDQYLYYLSKTINGSGQNQQTLKFSVAGPSNMAVQGRNYIPGPSYRQQRVSTTVTQNNNSENAWPGASSWALNGRNSLMNPGPAMASHKEGEDRFFPLSGSLIFGKQGTGRDNVDADKVMITNEEEIKTTNPVATESYGQVATNHQSAQAQAQTGWVQNQGILPGMVWQDRDVYLQGPIWAKIPHTDGNFHPSPLMGGFGMKHPPPQILIKNTPVPADPPTAFNKDKLNSFITQYSTGQVSVEIEWELQKENSKRWNPEIQYTSNYYKSNNVEFAVNTEGVYSEPRPIGTRYLTRNL

SEQ ID NO: 137 - DNA, 2208 bp, synthetic construct
  misc_feature 1..2208: note = Adeno Associated Virus Capsid Protein Variant
  source 1..2208: mol_type = other DNA
atggctgccgatggttatcttccagattggctcgaggacaaccttagtgaaggaattcgcgagtggtgggctttgaaacctggagcccctcaacccaaggcaaatcaacaacatcaagacaacgctcgaggtcttgtgcttccgggttacaaataccttggacccggcaacggactcgacaagggggagccggtcaacgcagcagacgcggcggccctcgagcacgacaaggcctacgaccagcagctcaaggccggagacaacccgtacctcaagtacaaccacgccgacgccgagttccaggagcggctcaaagaagatacgtcttttgggggcaacctcgggcgagcagtcttccaggccaaaaagaggcttcttgaacctcttggtctggttgaggaagcggctaagacggctcctggaaagaagaggcctgtagagcagtctcctcaggaaccggactcctccgcgggtattggcaaatcgggtgcacagcccgctaaaaagagactcaatttcggtcagactggcgacacagagtcagtcccagaccctcaaccaatcggagaacctcccgcagccccctcaggtgtgggatctcttacaatggcttcaggtggtggcgcaccagtggcagacaataacgaaggtgccgatggagtgggtagttcctcgggaaattggcattgcgattcccaatggctgggggacagagtcatcaccaccagcacccgaacctgggccctgcccacctacaacaatcacctctacaagcaaatctccaacagcacatctggaggatcttcaaatgacaacgcctacttcggctacagcaccccctgggggtattttgacttcaacagattccactgccacttctcaccacgtgactggcagcgactcatcaacaacaactggggattccggcctaagcgactcaacttcaagctcttcaacattcaggtcaaagaggttacggacaacaatggagtcaagaccatcgccaataaccttaccagcacggtccaggtcttcacggactcagactatcagctcccgtacgtgctcgggtcggctcacgagggctgcctcccgccgttcccagcggacgttttcatgattcctcagtacgggtatctgacgcttaatgatggaagccaggccgtgggtcgttcgtccttttactgcctggaatatttcccgtcgcaaatgctaagaacgggtaacaacttccagttcagctacgagtttgagaacgtacctttccatagcagctacgctcacagccaaagcctggaccgactaatgaatccactcatcgaccaatacttgtactatctctcaaagactattaacggttctggacagaatcaacaaacgctaaaattcagtgtggccggacccagcaacatggctgtccagggaagaaactacatacctggacccagctaccgacaacaacgtgtctcaaccactgtgactcaaaacaacaacagcgaatttgcttggcctggagcttcttcttgggctctcaatggacgtaatagcttgatgaatcctggacctgctatggccagccacaaagaaggagaggaccgtttctttcctttgtctggatctttaatttttggcaaacaaggaactggaagagacaacgtgggggcggacaaagtcatgataaccaacgaagaagaaattaaaactactaacccggtagcaacggagtcctatggacaagtggccacaaaccaccagagtgcccaagcacaggcgcagaccggctgggttcaaaaccaaggaatacttccgggtatggtttggcaggacagagatgtgtacctgcaaggacccatttgggccaaaattcctcacacggacggcaactttcacccttctccgctgatgggagggtttggaatgaagcacccgcctcctcagatcctcatcaaaaacacacctgtacctgcggatcctccaacggccttcaacaaggacaagctgaactctttcatcacccagtattctactggccaagtcagcgtggagatcgagtgggagctgcagaaggaaaacagcaagcgctggaacccggagatccagtacacttccaactattacaagtctaataatgttgaatttgctgttaatactgaaggtgtatatagtgaaccccgccccattggcaccagatacctgactcgtaatctg

SEQ ID NO: 138 - protein, 736 aa, synthetic construct
  REGION 1..736: note = Adeno Associated Virus Capsid Protein Variant
MAADGYLPDWLEDNLSEGIREWWALKPGAPQPKANQQHQDNARGLVLPGYKYLGPGNGLDKGEPVNAADAAALEHDKAYDQQLKAGDNPYLKYNHADAEFQERLKEDTSFGGNLGRAVFQAKKRLLEPLGLVEEAAKTAPGKKRPVEQSPQEPDSSAGIGKSGAQPAKKRLNFGQTGDTESVPDPQPIGEPPAAPSGVGSLTMASGGGAPVADNNEGADGVGSSSGNWHCDSQWLGDRVITTSTRTWALPTYNNHLYKQISNSTSGGSSNDNAYFGYSTPWGYFDFNRFHCHFSPRDWQRLINNNWGFRPKRLNFKLFNIQVKEVTDNNGVKTIANNLTSTVQVFTDSDYQLPYVLGSAHEGCLPPFPADVFMIPQYGYLTLNDGSQAVGRSSFYCLEYFPSQMLRTGNNFQFSYEFENVPFHSSYAHSQSLDRLMNPLIDQYLYYLSKTINGSGQNQQTLKFSVAGPSNMAVQGRNYIPGPSYRQQRVSTTVTQNNNSEFAWPGASSWALNGRNSLMNPGPAMASHKEGEDRFFPLSGSLIFGKQGTGRDNVGADKVMITNEEEIKTTNPVATESYGQVATNHQSAQAQAQTGWVQNQGILPGMVWQDRDVYLQGPIWAKIPHTDGNFHPSPLMGGFGMKHPPPQILIKNTPVPADPPTAFNKDKLNSFITQYSTGQVSVEIEWELQKENSKRWNPEIQYTSNYYKSNNVEFAVNTEGVYSEPRPIGTRYLTRNL

SEQ ID NO: 139 - DNA, 2208 bp, synthetic construct
  misc_feature 1..2208: note = Adeno Associated Virus Capsid Protein Variant
  source 1..2208: mol_type = other DNA
atggctgccgatggttatcttccagattggctcgaggacaaccttagtgaaggaattcgcgagtggtgggctttgaaacctggagcccctcaacccaaggcaaatcaacaacatcaagacaacgctcgaggtcttgtgcttccgggttacaaataccttggacccggcaacggactcgacaagggggagccggtcaacgcagcagacgcggcggccctcgagcacgacaaggcctacgaccagcagctcaaggccggagacaacccgtacctcaagtacaaccacgccgacgccgagttccaggagcggctcaaagaagatacgtcttttgggggcaacctcgggcgagcagtcttccaggccaaaaagaggcttcttgaacctcttggtctggttgaggaagcggctaagacggctcctggaaagaagaggcctgtagagcagtctcctcaggaaccggactcctccgcgggtattggcaaatcgggtgcacagcccgctaaaaagagactcaatttcggtcagactggcgacacagagtcagtcccagaccctcaaccaatcggagaacctcccgcagccccctcaggtgtgggatctcttacaatggcttcaggtggtggcgcaccagtggcagacaataacgaaggtgccgatggagtgggtagttcctcgggaaattggcattgcgattcccaatggctgggggacagagtcatcaccaccagcacccgaacctgggccctgcccacctacaacaatcacctctacaagcaaatctccaacagcacatctggaggatcttcaaatgacaacgcctacttcggctacagcaccccctgggggtattttgacttcaacagattccactgccacttctcaccacgtgactggcagcgactcatcaacaacaactggggattccggcctaagcgactcaacttcaagctcttcaacattcaggtcaaagaggttacggacaacaatggagtcaagaccatcgccaataaccttaccagcacggtccaggtcttcacggactcagactatcagctcccgtacgtgctcgggtcggctcacgagggctgcctcccgccgttcccagcggacgttttcatgattcctcagtacgggtatctgacgcttaatgatggaagccaggccgtgggtcgttcgtccttttactgcctggaatatttcccgtcgcaaatgctaagaacgggtaacaacttccagttcagctacgagtttgagaacgtacctttccatagcagctacgctcacagccaaagcctggaccgactaatgaatccactcatcgaccaatacttgtactatctctcaaagactattaacggttctggacagaatcaacaaacgctaaaattcagtgtggccggacccagcaacatggctgtccagggaagaaactacatacctggacccagctaccgacaacaacgttgttcaaccactgtgactcaaaacaacaacagcgaatttgcttggcctggagcttcttcttgggctctcaatggacgtaatagcttgatgaatcctggacctgctatggccagccacaaagaaggagaggaccgtttctttcctttgtctggatctttaatttttggcaaacaaggaactggaagagacaacgtggatgcggacaaagtcatgataaccaacgaagaagaaattaaaactactaacccggtagcaacggagtcctatggacaagtggccacaaaccaccagagtgcccaagcacaggcgcagaccggctgggttcaaaaccaaggaatacttccgggtatggtttggcaggacagagatgtgtacctgcaaggacccatttgggccaaaattcctcacacggacggcaactttcacccttctccgctgatgggagggtttggaatgaagcacccgcctcctcagatcctcatcaaaaacacacctgtacctgcggatcctccaacggccttcaacaaggacaagctgaactctttcatcacccagtattctactggccaagtcagcgtggagatcgagtgggagctgcagaaggaaaacagcaagcgctggaacccggagatccagtacacttccaactattacaagtctaataatgttgaatttgctgttaatactgaaggtgtatatagtgaaccccgccccattggcaccagatacctgactcgtaatctg

SEQ ID NO: 140 - protein, 736 aa, synthetic construct
  REGION 1..736: note = Adeno Associated Virus Capsid Protein Variant
MAADGYLPDWLEDNLSEGIREWWALKPGAPQPKANQQHQDNARGLVLPGYKYLGPGNGLDKGEPVNAADAAALEHDKAYDQQLKAGDNPYLKYNHADAEFQERLKEDTSFGGNLGRAVFQAKKRLLEPLGLVEEAAKTAPGKKRPVEQSPQEPDSSAGIGKSGAQPAKKRLNFGQTGDTESVPDPQPIGEPPAAPSGVGSLTMASGGGAPVADNNEGADGVGSSSGNWHCDSQWLGDRVITTSTRTWALPTYNNHLYKQISNSTSGGSSNDNAYFGYSTPWGYFDFNRFHCHFSPRDWQRLINNNWGFRPKRLNFKLFNIQVKEVTDNNGVKTIANNLTSTVQVFTDSDYQLPYVLGSAHEGCLPPFPADVFMIPQYGYLTLNDGSQAVGRSSFYCLEYFPSQMLRTGNNFQFSYEFENVPFHSSYAHSQSLDRLMNPLIDQYLYYLSKTINGSGQNQQTLKFSVAGPSNMAVQGRNYIPGPSYRQQRCSTTVTQNNNSEFAWPGASSWALNGRNSLMNPGPAMASHKEGEDRFFPLSGSLIFGKQGTGRDNVDADKVMITNEEEIKTTNPVATESYGQVATNHQSAQAQAQTGWVQNQGILPGMVWQDRDVYLQGPIWAKIPHTDGNFHPSPLMGGFGMKHPPPQILIKNTPVPADPPTAFNKDKLNSFITQYSTGQVSVEIEWELQKENSKRWNPEIQYTSNYYKSNNVEFAVNTEGVYSEPRPIGTRYLTRNL

SEQ ID NO: 141 - DNA, 2208 bp, synthetic construct
  misc_feature 1..2208: note = Adeno Associated Virus Capsid Protein Variant
  source 1..2208: mol_type = other DNA
atggctgccgatggttatcttccagattggctcgaggacaaccttagtgaaggaattcgcgagtggtgggctttgaaacctggagcccctcaacccaaggcaaatcaacaacatcaagacaacgctcgaggtcttgtgcttccgggttacaaataccttggacccggcaacggactcgacaagggggagccggtcaacgcagcagacgcggcggccctcgagcacgacaaggcctacgaccagcagctcaaggccggagacaacccgtacctcaagtacaaccacgccgacgccgagttccaggagcggctcaaagaagatacgtcttttgggggcaacctcgggcgagcagtcttccaggccaaaaagaggcttcttgaacctcttggtctggttgaggaagcggctaagacggctcctggaaagaagaggcctgtagagcagtctcctcaggaaccggactcctccgcgggtattggcaaatcgggtgcacagcccgctaaaaagagactcaatttcggtcagactggcgacacagagtcagtcccagaccctcaaccaatcggagaacctcccgcagccccctcaggtgtgggatctcttacaatggcttcaggtggtggcgcaccagtggcagacaataacgaaggtgccgatggagtgggtagttcctcgggaaattggcattgcgattcccaatggctgggggacagagtcatcaccaccagcacccgaacctgggccctgcccacctacaacaatcacctctacaagcaaatctccaacagcacatctggaggatcttcaaatgacaacgcctacttcggctacagcaccccctgggggtattttgacttcaacagattccactgccacttctcaccacgtgactggcagcgactcatcaacaacaactggggattccggcctaagcgactcaacttcaagctcttcaacattcaggtcaaagaggttacggacaacaatggagtcaagaccatcgccaataaccttaccagcacggtccaggtcttcacggactcagactatcagctcccgtacgtgctcgggtcggctcacgagggctgcctcccgccgttcccagcggacgttttcatgattcctcagtacgggtatctgacgcttaatgatggaagccaggccgtgggtcgttcgtccttttactgcctggaatatttcccgtcgcaaatgctaagaacgggtaacaacttccagttcagctacgagtttgagaacgtacctttccatagcagctacgctcacagccaaagcctggaccgactaatgaatccactcatcgaccaatacttgtactatctctcaaagactattaacggttctggacagaatcaacaatgtctaaaattcagtgtggccggacccagcaacatggctgtccagggaagaaactacatacctggacccagctaccgacaacaacgtgtctcaaccactgtgactcaaaacaacaacagcgaatttgcttggcctggagcttcttcttgggctctcaatggacgtaatagcttgatgaatcctggacctgctatggccagccacaaagaaggagaggaccgtttctttcctttgtctggatctttaatttttggcaaacaaggaactggaagagacaacgtggatgcggacaaagtcatgataaccaacgaagaagaaattaaaactactaacccggtagcaacggagtcctatggacaagtggccacaaaccaccagagtgcccaagcacaggcgcagaccggctgggttcaaaaccaaggaatacttccgggtatggtttggcaggacagagatgtgtacctgcaaggacccatttgggccaaaattcctcacacggacggcaactttcacccttctccgctgatgggagggtttggaatgaagcacccgcctcctcagatcctcatcaaaaacacacctgtacctgcggatcctccaacggccttcaacaaggacaagctgaactctttcatcacccagtattctactggccaagtcagcgtggagatcgagtgggagctgcagaaggaaaacagcaagcgctggaacccggagatccagtacacttccaactattacaagtctaataatgttgaatttgctgttaatactgaaggtgtatatagtgaaccccgccccattggcaccagatacctgactcgtaatctg

SEQ ID NO: 142 - protein, 736 aa, synthetic construct
  REGION 1..736: note = Adeno Associated Virus Capsid Protein Variant
MAADGYLPDWLEDNLSEGIREWWALKPGAPQPKANQQHQDNARGLVLPGYKYLGPGNGLDKGEPVNAADAAALEHDKAYDQQLKAGDNPYLKYNHADAEFQERLKEDTSFGGNLGRAVFQAKKRLLEPLGLVEEAAKTAPGKKRPVEQSPQEPDSSAGIGKSGAQPAKKRLNFGQTGDTESVPDPQPIGEPPAAPSGVGSLTMASGGGAPVADNNEGADGVGSSSGNWHCDSQWLGDRVITTSTRTWALPTYNNHLYKQISNSTSGGSSNDNAYFGYSTPWGYFDFNRFHCHFSPRDWQRLINNNWGFRPKRLNFKLFNIQVKEVTDNNGVKTIANNLTSTVQVFTDSDYQLPYVLGSAHEGCLPPFPADVFMIPQYGYLTLNDGSQAVGRSSFYCLEYFPSQMLRTGNNFQFSYEFENVPFHSSYAHSQSLDRLMNPLIDQYLYYLSKTINGSGQNQQCLKFSVAGPSNMAVQGRNYIPGPSYRQQRVSTTVTQNNNSEFAWPGASSWALNGRNSLMNPGPAMASHKEGEDRFFPLSGSLIFGKQGTGRDNVDADKVMITNEEEIKTTNPVATESYGQVATNHQSAQAQAQTGWVQNQGILPGMVWQDRDVYLQGPIWAKIPHTDGNFHPSPLMGGFGMKHPPPQILIKNTPVPADPPTAFNKDKLNSFITQYSTGQVSVEIEWELQKENSKRWNPEIQYTSNYYKSNNVEFAVNTEGVYSEPRPIGTRYLTRNL

SEQ ID NO: 143 - DNA, 2208 bp, synthetic construct
  misc_feature 1..2208: note = Adeno Associated Virus Capsid Protein Variant
  source 1..2208: mol_type = other DNA
atggctgccgatggttatcttccagattggctcgaggacaaccttagtgaaggaattcgcgagtggtgggctttgaaacctggagcccctcaacccaaggcaaatcaacaacatcaagacaacgctcgaggtcttgtgcttccgggttacaaataccttggacccggcaacggactcgacaagggggagccggtcaacgcagcagacgcggcggccctcgagcacgacaaggcctacgaccagcagctcaaggccggagacaacccgtacctcaagtacaaccacgccgacgccgagttccaggagcggctcaaagaagatacgtcttttgggggcaacctcgggcgagcagtcttccaggccaaaaagaggcttcttgaacctcttggtctggttgaggaagcggctaagacggctcctggaaagaagaggcctgtagagcagtctcctcaggaaccggactcctccgcgggtattggcaaatcgggtgcacagcccgctaaaaagagactcaatttcggtcagactggcgacacagagtcagtcccagaccctcaaccaatcggagaacctcccgcagccccctcaggtgtgggatctcttacaatggcttcaggtggtggcgcaccagtggcagacaataacgaaggtgccgatggagtgggtagttcctcgggaaattggcattgcgattcccaatggctgggggacagagtcatcaccaccagcacccgaacctgggccctgcccacctacaacaatcacctctacaagcaaatctccaacagcacatctggaggatcttcaaatgacaacgcctacttcggctacagcaccccctgggggtattttgacttcaacagattccactgccacttctcaccacgtgactggcagcgactcatcaacaacaactggggattccggcctaagcgactcaacttcaagctcttcaacattcaggtcaaagaggttacggacaacaatggagtcaagaccatcgccaataaccttaccagcacggtccaggtcttcacggactcagactatcagctcccgtacgtgctcgggtcggctcacgagggctgcctcccgccgttcccagcggacgttttcatgattcctcagtacgggtatctgacgcttaatgatggaagccaggccgtgggtcgttcgtccttttactgcctggaatatttcccgtcgcaaatgctaagaacgggtaacaacttccagttcagctacgagtttgagaacgtacctttccatagcagctacgctcacagccaaagcctggaccgactaatgaatccactcatcgaccaatacttgtactatctctcaaagactattaacggttctggacaggggcaacaaacgctaaaattcagtgtggccggacccagcaacatggctgtccagggaagaaactacatacctggacccagctaccgacaacaacgtgtctcaaccactgtgactcaaaacaacaacagcgaatttgcttggcctggagcttcttcttgggctctcaatggacgtaatagcttgatgaatcctggacctgctatggccagccacaaagaaggagaggaccgtttctttcctttgtctggatctttaatttttggcaaacaaggaactggaagagacaacgtggatgcggacaaagtcatgataaccaacgaagaagaaattaaaactactaacccggtagcaacggagtcctatggacaagtggccacaaaccaccagagtgcccaagcacaggcgcagaccggctgggttcaaaaccaaggaatacttccgggtatggtttggcaggacagagatgtgtacctgcaaggacccatttgggccaaaattcctcacacggacggcaactttcacccttctccgctgatgggagggtttggaatgaagcacccgcctcctcagatcctcatcaaaaacacacctgtacctgcggatcctccaacggccttcaacaaggacaagctgaactctttcatcacccagtattctactggccaagtcagcgtggagatcgagtgggagctgcagaaggaaaacagcaagcgctggaacccggagatccagtacacttccaactattacaagtctaataatgttgaatttgctgttaatactgaaggtgtatatagtgaaccccgccccattggcaccagatacctgactcgtaatctg

SEQ ID NO: 144 - protein, 736 aa, synthetic construct
  REGION 1..736: note = Adeno Associated Virus Capsid Protein Variant
MAADGYLPDWLEDNLSEGIREWWALKPGAPQPKANQQHQDNARGLVLPGYKYLGPGNGLDKGEPVNAADAAALEHDKAYDQQLKAGDNPYLKYNHADAEFQERLKEDTSFGGNLGRAVFQAKKRLLEPLGLVEEAAKTAPGKKRPVEQSPQEPDSSAGIGKSGAQPAKKRLNFGQTGDTESVPDPQPIGEPPAAPSGVGSLTMASGGGAPVADNNEGADGVGSSSGNWHCDSQWLGDRVITTSTRTWALPTYNNHLYKQISNSTSGGSSNDNAYFGYSTPWGYFDFNRFHCHFSPRDWQRLINNNWGFRPKRLNFKLFNIQVKEVTDNNGVKTIANNLTSTVQVFTDSDYQLPYVLGSAHEGCLPPFPADVFMIPQYGYLTLNDGSQAVGRSSFYCLEYFPSQMLRTGNNFQFSYEFENVPFHSSYAHSQSLDRLMNPLIDQYLYYLSKTINGSGQGQQTLKFSVAGPSNMAVQGRNYIPGPSYRQQRVSTTVTQNNNSEFAWPGASSWALNGRNSLMNPGPAMASHKEGEDRFFPLSGSLIFGKQGTGRDNVDADKVMITNEEEIKTTNPVATESYGQVATNHQSAQAQAQTGWVQNQGILPGMVWQDRDVYLQGPIWAKIPHTDGNFHPSPLMGGFGMKHPPPQILIKNTPVPADPPTAFNKDKLNSFITQYSTGQVSVEIEWELQKENSKRWNPEIQYTSNYYKSNNVEFAVNTEGVYSEPRPIGTRYLTRNL

SEQ ID NO: 145 - DNA, 2208 bp, synthetic construct
  misc_feature 1..2208: note = Adeno Associated Virus Capsid Protein Variant
  source 1..2208: mol_type = other DNA
atggctgccgatggttatcttccagattggctcgaggacaaccttagtgaaggaattcgcgagtggtgggctttgaaacctggagcccctcaacccaaggcaaatcaacaacatcaagacaacgctcgaggtcttgtgcttccgggttacaaataccttggacccggcaacggactcgacaagggggagccggtcaacgcagcagacgcggcggccctcgagcacgacaaggcctacgaccagcagctcaaggccggagacaacccgtacctcaagtacaaccacgccgacgccgagttccaggagcggctcaaagaagatacgtcttttgggggcaacctcgggcgagcagtcttccaggccaaaaagaggcttcttgaacctcttggtctggttgaggaagcggctaagacggctcctggaaagaagaggcctgtagagcagtctcctcaggaaccggactcctccgcgggtattggcaaatcgggtgcacagcccgctaaaaagagactcaatttcggtcagactggcgacacagagtcagtcccagaccctcaaccaatcggagaacctcccgcagccccctcaggtgtgggatctcttacaatggcttcaggtggtggcgcaccagtggcagacaataacgaaggtgccgatggagtgggtagttcctcgggaaattggcattgcgattcccaatggctgggggacagagtcatcaccaccagcacccgaacctgggccctgcccacctacaacaatcacctctacaagcaaatctccaacagcacatctggaggatcttcaaatgacaacgcctacttcggctacagcaccccctgggggtattttgacttcaacagattccactgccacttctcaccacgtgactggcagcgactcatcaacaacaactggggattccggcctaagcgactcaacttcaagctcttcaacattcaggtcaaagaggttacggacaacaatggagtcaagaccatcgccaataaccttaccagcacggtccaggtcttcacggactcagactatcagctcccgtacgtgctcgggtcggctcacgagggctgcctcccgccgttcccagcggacgttttcatgattcctcagtacgggtatctgacgcttaatgatggaagccaggccgtgggtcgttcgtccttttactgcctggaatatttcccgtcgcaaatgctaagaacgggtaacaacttccagttcagctacgagtttgagaacgtacctttccatagcagctacgctcacagccaaagcctggaccgactaatgaatccactcatcgaccaatacttgtactatctctcaaagactattaacggttctggacagaatcaacaaacgctaaaattcagtgtggccggacccagcaacatggctgtccagggaagaaactacatacctggacccagctaccgacaacaacgtgtctcaaccactgtgactcaaaacaacaacagcgggtttgcttggcctggagcttcttcttgggctctcaatggacgtaatagcttgatgaatcctggacctgctatggccagccacaaagaaggagaggaccgtttctttcctttgtctggatctttaatttttggcaaacaaggaactggaagagacaacgtggatgcggacaaagtcatgataaccaacgaagaagaaattaaaactactaacccggtagcaacggagtcctatggacaagtggccacaaaccaccagagtgcccaagcacaggcgcagaccggctgggttcaaaaccaaggaatacttccgggtatggtttggcaggacagagatgtgtacctgcaaggacccatttgggccaaaattcctcacacggacggcaactttcacccttctccgctgatgggagggtttggaatgaagcacccgcctcctcagatcctcatcaaaaacacacctgtacctgcggatcctccaacggccttcaacaaggacaagctgaactctttcatcacccagtattctactggccaagtcagcgtggagatcgagtgggagctgcagaaggaaaacagcaagcgctggaacccggagatccagtacacttccaactattacaagtctaataatgttgaatttgctgttaatactgaaggtgtatatagtgaaccccgccccattggcaccagatacctgactcgtaatctg

SEQ ID NO: 146 - protein, 736 aa, synthetic construct
  REGION 1..736: note = Adeno Associated Virus Capsid Protein Variant
MAADGYLPDWLEDNLSEGIREWWALKPGAPQPKANQQHQDNARGLVLPGYKYLGPGNGLDKGEPVNAADAAALEHDKAYDQQLKAGDNPYLKYNHADAEFQERLKEDTSFGGNLGRAVFQAKKRLLEPLGLVEEAAKTAPGKKRPVEQSPQEPDSSAGIGKSGAQPAKKRLNFGQTGDTESVPDPQPIGEPPAAPSGVGSLTMASGGGAPVADNNEGADGVGSSSGNWHCDSQWLGDRVITTSTRTWALPTYNNHLYKQISNSTSGGSSNDNAYFGYSTPWGYFDFNRFHCHFSPRDWQRLINNNWGFRPKRLNFKLFNIQVKEVTDNNGVKTIANNLTSTVQVFTDSDYQLPYVLGSAHEGCLPPFPADVFMIPQYGYLTLNDGSQAVGRSSFYCLEYFPSQMLRTGNNFQFSYEFENVPFHSSYAHSQSLDRLMNPLIDQYLYYLSKTINGSGQNQQTLKFSVAGPSNMAVQGRNYIPGPSYRQQRVSTTVTQNNNSGFAWPGASSWALNGRNSLMNPGPAMASHKEGEDRFFPLSGSLIFGKQGTGRDNVDADKVMITNEEEIKTTNPVATESYGQVATNHQSAQAQAQTGWVQNQGILPGMVWQDRDVYLQGPIWAKIPHTDGNFHPSPLMGGFGMKHPPPQILIKNTPVPADPPTAFNKDKLNSFITQYSTGQVSVEIEWELQKENSKRWNPEIQYTSNYYKSNNVEFAVNTEGVYSEPRPIGTRYLTRNL

SEQ ID NO: 147 - DNA, 2208 bp, synthetic construct
  misc_feature 1..2208: note = Adeno Associated Virus Capsid Protein Variant
  source 1..2208: mol_type = other DNA
atggctgccgatggttatcttccagattggctcgaggacaaccttagtgaaggaattcgcgagtggtgggctttgaaacctggagcccctcaacccaaggcaaatcaacaacatcaagacaacgctcgaggtcttgtgcttccgggttacaaataccttggacccggcaacggactcgacaagggggagccggtcaacgcagcagacgcggcggccctcgagcacgacaaggcctacgaccagcagctcaaggccggagacaacccgtacctcaagtacaaccacgccgacgccgagttccaggagcggctcaaagaagatacgtcttttgggggcaacctcgggcgagcagtcttccaggccaaaaagaggcttcttgaacctcttggtctggttgaggaagcggctaagacggctcctggaaagaagaggcctgtagagcagtctcctcaggaaccggactcctccgcgggtattggcaaatcgggtgcacagcccgctaaaaagagactcaatttcggtcagactggcgacacagagtcagtcccagaccctcaaccaatcggagaacctcccgcagccccctcaggtgtgggatctcttacaatggcttcaggtggtggcgcaccagtggcagacaataacgaaggtgccgatggagtgggtagttcctcgggaaattggcattgcgattcccaatggctgggggacagagtcatcaccaccagcacccgaacctgggccctgcccacctacaacaatcacctctacaagcaaatctccaacagcacatctggaggatcttcaaatgacaacgcctacttcggctacagcaccccctgggggtattttgacttcaacagattccactgccacttctcaccacgtgactggcagcgactcatcaacaacaactggggattccggcctaagcgactcaacttcaagctcttcaacattcaggtcaaagaggttacggacaacaatggagtcaagaccatcgccaataaccttaccagcacggtccaggtcttcacggactcagactatcagctcccgtacgtgctcgggtcggctcacgagggctgcctcccgccgttcccagcggacgttttcatgattcctcagtacgggtatctgacgcttaatgatggaagccaggccgtgggtcgttcgtccttttactgcctggaatatttcccgtcgcaaatgctaagaacgggtaacaacttccagttcagctacgagtttgagaacgtacctttccatagcagctacgctcacagccaaagcctggaccgactaatgaatccactcatcgaccaatacttgtactatctctcaaagactattaacggttctggacagaatcaacaaacgctaaaattcagtgtggccggacccagcaacatggctgtccagggaagaaactacatacctggacccagctaccgacaacaacgtgtctcaaccactgtgactcaaaacaacaacagcgaatttgcttggcctggagcttcttcttgggctctcaatggacgtaatagcttgatgaatcctggacctgctatggccagccacaaagaaggagaggaccgtttctttcctttgtctggatctttaatttttggcaaacaaggaactggaagagacaacgtgctggcggacaaagtcatgataaccaacgaagaagaaattaaaactactaacccggtagcaacggagtcctatggacaagtggccacaaaccaccagagtgcccaagcacaggcgcagaccggctgggttcaaaaccaaggaatacttccgggtatggtttggcaggacagagatgtgtacctgcaaggacccatttgggccaaaattcctcacacggacggcaactttcacccttctccgctgatgggagggtttggaatgaagcacccgcctcctcagatcctcatcaaaaacacacctgtacctgcggatcctccaacggccttcaacaaggacaagctgaactctttcatcacccagtattctactggccaagtcagcgtggagatcgagtgggagctgcagaaggaaaacagcaagcgctggaacccggagatccagtacacttccaactattacaagtctaataatgttgaatttgctgttaatactgaaggtgtatatagtgaaccccgccccattggcaccagatacctgactcgtaatctg

SEQ ID NO: 148 - protein, 736 aa, synthetic construct
  REGION 1..736: note = Adeno Associated Virus Capsid Protein Variant
MAADGYLPDWLEDNLSEGIREWWALKPGAPQPKANQQHQDNARGLVLPGYKYLGPGNGLDKGEPVNAADAAALEHDKAYDQQLKAGDNPYLKYNHADAEFQERLKEDTSFGGNLGRAVFQAKKRLLEPLGLVEEAAKTAPGKKRPVEQSPQEPDSSAGIGKSGAQPAKKRLNFGQTGDTESVPDPQPIGEPPAAPSGVGSLTMASGGGAPVADNNEGADGVGSSSGNWHCDSQWLGDRVITTSTRTWALPTYNNHLYKQISNSTSGGSSNDNAYFGYSTPWGYFDFNRFHCHFSPRDWQRLINNNWGFRPKRLNFKLFNIQVKEVTDNNGVKTIANNLTSTVQVFTDSDYQLPYVLGSAHEGCLPPFPADVFMIPQYGYLTLNDGSQAVGRSSFYCLEYFPSQMLRTGNNFQFSYEFENVPFHSSYAHSQSLDRLMNPLIDQYLYYLSKTINGSGQNQQTLKFSVAGPSNMAVQGRNYIPGPSYRQQRVSTTVTQNNNSEFAWPGASSWALNGRNSLMNPGPAMASHKEGEDRFFPLSGSLIFGKQGTGRDNVLADKVMITNEEEIKTTNPVATESYGQVATNHQSAQAQAQTGWVQNQGILPGMVWQDRDVYLQGPIWAKIPHTDGNFHPSPLMGGFGMKHPPPQILIKNTPVPADPPTAFNKDKLNSFITQYSTGQVSVEIEWELQKENSKRWNPEIQYTSNYYKSNNVEFAVNTEGVYSEPRPIGTRYLTRNL

SEQ ID NO: 149 - DNA, 2208 bp, synthetic construct
  misc_feature 1..2208: note = Adeno Associated Virus Capsid Protein Variant
  source 1..2208: mol_type = other DNA
atggctgccgatggttatcttccagattggctcgaggacaaccttagtgaaggaattcgcgagtggtgggctttgaaacctggagcccctcaacccaaggcaaatcaacaacatcaagacaacgctcgaggtcttgtgcttccgggttacaaataccttggacccggcaacggactcgacaagggggagccggtcaacgcagcagacgcggcggccctcgagcacgacaaggcctacgaccagcagctcaaggccggagacaacccgtacctcaagtacaaccacgccgacgccgagttccaggagcggctcaaagaagatacgtcttttgggggcaacctcgggcgagcagtcttccaggccaaaaagaggcttcttgaacctcttggtctggttgaggaagcggctaagacggctcctggaaagaagaggcctgtagagcagtctcctcaggaaccggactcctccgcgggtattggcaaatcgggtgcacagcccgctaaaaagagactcaatttcggtcagactggcgacacagagtcagtcccagaccctcaaccaatcggagaacctcccgcagccccctcaggtgtgggatctcttacaatggcttcaggtggtggcgcaccagtggcagacaataacgaaggtgccgatggagtgggtagttcctcgggaaattggcattgcgattcccaatggctgggggacagagtcatcaccaccagcacccgaacctgggccctgcccacctacaacaatcacctctacaagcaaatctccaacagcacatctggaggatcttcaaatgacaacgcctacttcggctacagcaccccctgggggtattttgacttcaacagattccactgccacttctcaccacgtgactggcagcgactcatcaacaacaactggggattccggcctaagcgactcaacttcaagctcttcaacattcaggtcaaagaggttacggacaacaatggagtcaagaccatcgccaataaccttaccagcacggtccaggtcttcacggactcagactatcagctcccgtacgtgctcgggtcggctcacgagggctgcctcccgccgttcccagcggacgttttcatgattcctcagtacgggtatctgacgcttaatgatggaagccaggccgtgggtcgttcgtccttttactgcctggaatatttcccgtcgcaaatgctaagaacgggtaacaacttccagttcagctacgagtttgagaacgtacctttccatagcagctacgctcacagccaaagcctggaccgactaatgaatccactcatcgaccaatacttgtactatctctcaaagactattaactggtctggacagaatcaacaaacgctaaaattcagtgtggccggacccagcaacatggctgtccagggaagaaactacatacctggacccagctaccgacaacaacgtgtctcaaccactgtgactcaaaacaacaacagcgaatttgcttggcctggagcttcttcttgggctctcaatggacgtaatagcttgatgaatcctggacctgctatggccagccacaaagaaggagaggaccgtttctttcctttgtctggatctttaatttttggcaaacaaggaactggaagagacaacgtggatgcggacaaagtcatgataaccaacgaagaagaaattaaaactactaacccggtagcaacggagtcctatggacaagtggccacaaaccaccagagtgcccaagcacaggcgcagaccggctgggttcaaaaccaaggaatacttccgggtatggtttggcaggacagagatgtgtacctgcaaggacccatttgggccaaaattcctcacacggacggcaactttcacccttctccgctgatgggagggtttggaatgaagcacccgcctcctcagatcctcatcaaaaacacacctgtacctgcggatcctccaacggccttcaacaaggacaagctgaactctttcatcacccagtattctactggccaagtcagcgtggagatcgagtgggagctgcagaaggaaaacagcaagcgctggaacccggagatccagtacacttccaactattacaagtctaataatgttgaatttgctgttaatactgaaggtgtatatagtgaaccccgccccattggcaccagatacctgactcgtaatctg

SEQ ID NO: 150 - protein, 736 aa, synthetic construct
  REGION 1..736: note = Adeno Associated Virus Capsid Protein Variant
MAADGYLPDWLEDNLSEGIREWWALKPGAPQPKANQQHQDNARGLVLPGYKYLGPGNGLDKGEPVNAADAAALEHDKAYDQQLKAGDNPYLKYNHADAEFQERLKEDTSFGGNLGRAVFQAKKRLLEPLGLVEEAAKTAPGKKRPVEQSPQEPDSSAGIGKSGAQPAKKRLNFGQTGDTESVPDPQPIGEPPAAPSGVGSLTMASGGGAPVADNNEGADGVGSSSGNWHCDSQWLGDRVITTSTRTWALPTYNNHLYKQISNSTSGGSSNDNAYFGYSTPWGYFDFNRFHCHFSPRDWQRLINNNWGFRPKRLNFKLFNIQVKEVTDNNGVKTIANNLTSTVQVFTDSDYQLPYVLGSAHEGCLPPFPADVFMIPQYGYLTLNDGSQAVGRSSFYCLEYFPSQMLRTGNNFQFSYEFENVPFHSSYAHSQSLDRLMNPLIDQYLYYLSKTINWSGQNQQTLKFSVAGPSNMAVQGRNYIPGPSYRQQRVSTTVTQNNNSEFAWPGASSWALNGRNSLMNPGPAMASHKEGEDRFFPLSGSLIFGKQGTGRDNVDADKVMITNEEEIKTTNPVATESYGQVATNHQSAQAQAQTGWVQNQGILPGMVWQDRDVYLQGPIWAKIPHTDGNFHPSPLMGGFGMKHPPPQILIKNTPVPADPPTAFNKDKLNSFITQYSTGQVSVEIEWELQKENSKRWNPEIQYTSNYYKSNNVEFAVNTEGVYSEPRPIGTRYLTRNL

SEQ ID NO: 151 - DNA, 2208 bp, synthetic construct
  misc_feature 1..2208: note = Adeno Associated Virus Capsid Protein Variant
  source 1..2208: mol_type = other DNA
atggctgccgatggttatcttccagattggctcgaggacaaccttagtgaaggaattcgcgagtggtgggctttgaaacctggagcccctcaacccaaggcaaatcaacaacatcaagacaacgctcgaggtcttgtgcttccgggttacaaataccttggacccggcaacggactcgacaagggggagccggtcaacgcagcagacgcggcggccctcgagcacgacaaggcctacgaccagcagctcaaggccggagacaacccgtacctcaagtacaaccacgccgacgccgagttccaggagcggctcaaagaagatacgtcttttgggggcaacctcgggcgagcagtcttccaggccaaaaagaggcttcttgaacctcttggtctggttgaggaagcggctaagacggctcctggaaagaagaggcctgtagagcagtctcctcaggaaccggactcctccgcgggtattggcaaatcgggtgcacagcccgctaaaaagagactcaatttcggtcagactggcgacacagagtcagtcccagaccctcaaccaatcggagaacctcccgcagccccctcaggtgtgggatctcttacaatggcttcaggtggtggcgcaccagtggcagacaataacgaaggtgccgatggagtgggtagttcctcgggaaattggcattgcgattcccaatggctgggggacagagtcatcaccaccagcacccgaacctgggccctgcccacctacaacaatcacctctacaagcaaatctccaacagcacatctggaggatcttcaaatgacaacgcctacttcggctacagcaccccctgggggtattttgacttcaacagattccactgccacttctcaccacgtgactggcagcgactcatcaacaacaactggggattccggcctaagcgactcaacttcaagctcttcaacattcaggtcaaagaggttacggacaacaatggagtcaagaccatcgccaataaccttaccagcacggtccaggtcttcacggactcagactatcagctcccgtacgtgctcgggtcggctcacgagggctgcctcccgccgttcccagcggacgttttcatgattcctcagtacgggtatctgacgcttaatgatggaagccaggccgtgggtcgttcgtccttttactgcctggaatatttcccgtcgcaaatgctaagaacgggtaacaacttccagttcagctacgagtttgagaacgtacctttccatagcagctacgctcacagccaaagcctggaccgactaatgaatccactcatcgaccaatacttgtactatctctcaaagactattaacggttctggacagaatcaacaaacgctaaaattcagtgtggccggacccagcaacatggctgtccagggaagaaactacatacctggacccagctaccgacaacaacgtgtctcaaccactgtgactcaaaacaacaacagcgaatttgcttggcctggagcttcttcttgggctctcaatggacgtaatagcttgatgaatcctggacctgctatggccagccacaaagaaggagaggaccgtttctttcctttgtctggatctttaatttttggcaaacaaggaactggaagagacattgtggatgcggacaaagtcatgataaccaacgaagaagaaattaaaactactaacccggtagcaacggagtcctatggacaagtggccacaaaccaccagagtgcccaagcacaggcgcagaccggctgggttcaaaaccaaggaatacttccgggtatggtttggcaggacagagatgtgtacctgcaaggacccatttgggccaaaattcctcacacggacggcaactttcacccttctccgctgatgggagggtttggaatgaagcacccgcctcctcagatcctcatcaaaaacacacctgtacctgcggatcctccaacggccttcaacaaggacaagctgaactctttcatcacccagtattctactggccaagtcagcgtggagatcgagtgggagctgcagaaggaaaacagcaagcgctggaacccggagatccagtacacttccaactattacaagtctaataatgttgaatttgctgttaatactgaaggtgtatatagtgaaccccgccccattggcaccagatacctgactcgtaatctg

SEQ ID NO: 152 - protein, 736 aa, synthetic construct
  REGION 1..736: note = Adeno Associated Virus Capsid Protein Variant
MAADGYLPDWLEDNLSEGIREWWALKPGAPQPKANQQHQDNARGLVLPGYKYLGPGNGLDKGEPVNAADAAALEHDKAYDQQLKAGDNPYLKYNHADAEFQERLKEDTSFGGNLGRAVFQAKKRLLEPLGLVEEAAKTAPGKKRPVEQSPQEPDSSAGIGKSGAQPAKKRLNFGQTGDTESVPDPQPIGEPPAAPSGVGSLTMASGGGAPVADNNEGADGVGSSSGNWHCDSQWLGDRVITTSTRTWALPTYNNHLYKQISNSTSGGSSNDNAYFGYSTPWGYFDFNRFHCHFSPRDWQRLINNNWGFRPKRLNFKLFNIQVKEVTDNNGVKTIANNLTSTVQVFTDSDYQLPYVLGSAHEGCLPPFPADVFMIPQYGYLTLNDGSQAVGRSSFYCLEYFPSQMLRTGNNFQFSYEFENVPFHSSYAHSQSLDRLMNPLIDQYLYYLSKTINGSGQNQQTLKFSVAGPSNMAVQGRNYIPGPSYRQQRVSTTVTQNNNSEFAWPGASSWALNGRNSLMNPGPAMASHKEGEDRFFPLSGSLIFGKQGTGRDIVDADKVMITNEEEIKTTNPVATESYGQVATNHQSAQAQAQTGWVQNQGILPGMVWQDRDVYLQGPIWAKIPHTDGNFHPSPLMGGFGMKHPPPQILIKNTPVPADPPTAFNKDKLNSFITQYSTGQVSVEIEWELQKENSKRWNPEIQYTSNYYKSNNVEFAVNTEGVYSEPRPIGTRYLTRNL

SEQ ID NO: 153 - DNA, 2208 bp, synthetic construct
  misc_feature 1..2208: note = Adeno Associated Virus Capsid Protein Variant
  source 1..2208: mol_type = other DNA
atggctgccgatggttatcttccagattggctcgaggacaaccttagtgaaggaattcgcgagtggtgggctttgaaacctggagcccctcaacccaaggcaaatcaacaacatcaagacaacgctcgaggtcttgtgcttccgggttacaaataccttggacccggcaacggactcgacaagggggagccggtcaacgcagcagacgcggcggccctcgagcacgacaaggcctacgaccagcagctcaaggccggagacaacccgtacctcaagtacaaccacgccgacgccgagttccaggagcggctcaaagaagatacgtcttttgggggcaacctcgggcgagcagtcttccaggccaaaaagaggcttcttgaacctcttggtctggttgaggaagcggctaagacggctcctggaaagaagaggcctgtagagcagtctcctcaggaaccggactcctccgcgggtattggcaaatcgggtgcacagcccgctaaaaagagactcaatttcggtcagactggcgacacagagtcagtcccagaccctcaaccaatcggagaacctcccgcagccccctcaggtgtgggatctcttacaatggcttcaggtggtggcgcaccagtggcagacaataacgaaggtgccgatggagtgggtagttcctcgggaaattggcattgcgattcccaatggctgggggacagagtcatcaccaccagcacccgaacctgggccctgcccacctacaacaatcacctctacaagcaaatctccaacagcacatctggaggatcttcaaatgacaacgcctacttcggctacagcaccccctgggggtattttgacttcaacagattccactgccacttctcaccacgtgactggcagcgactcatcaacaacaactggggattccggcctaagcgactcaacttcaagctcttcaacattcaggtcaaagaggttacggacaacaatggagtcaagaccatcgccaataaccttaccagcacggtccaggtcttcacggactcagactatcagctcccgtacgtgctcgggtcggctcacgagggctgcctcccgccgttcccagcggacgttttcatgattcctcagtacgggtatctgacgcttaatgatggaagccaggccgtgggtcgttcgtccttttactgcctggaatatttcccgtcgcaaatgctaagaacgggtaacaacttccagttcagctacgagtttgagaacgtacctttccatagcagctacgctcacagccaaagcctggaccgactaatgaatccactcatcgaccaatacttgtactatctctcaaagactattaacggttctggacagaatcaacaaacgctaaaattcagtgtggccggacccagcaacatggctgtccagggaagaaactacatacctggacccagctaccgacaacaacgtgtctcaaccactgtgactcaaaacaacaacagccggtttgcttggcctggagcttcttcttgggctctcaatggacgtaatagcttgatgaatcctggacctgctatggccagccacaaagaaggagaggaccgtttctttcctttgtctggatctttaatttttggcaaacaaggaactggaagagacaacgtggatgcggacaaagtcatgataaccaacgaagaagaaattaaaactactaacccggtagcaacggagtcctatggacaagtggccacaaaccaccagagtgcccaagcacaggcgcagaccggctgggttcaaaaccaaggaatacttccgggtatggtttggcaggacagagatgtgtacctgcaaggacccatttgggccaaaattcctcacacggacggcaactttcacccttctccgctgatgggagggtttggaatgaagcacccgcctcctcagatcctcatcaaaaacacacctgtacctgcggatcctccaacggccttcaacaaggacaagctgaactctttcatcacccagtattctactggccaagtcagcgtggagatcgagtgggagctgcagaaggaaaacagcaagcgctggaacccggagatccagtacacttccaactattacaagtctaataatgttgaatttgctgttaatactgaaggtgtatatagtgaaccccgccccattggcaccagatacctgactcgtaatctg

SEQ ID NO: 154 - protein, 736 aa, synthetic construct
  REGION 1..736: note = Adeno Associated Virus Capsid Protein Variant
MAADGYLPDWLEDNLSEGIREWWALKPGAPQPKANQQHQDNARGLVLPGYKYLGPGNGLDKGEPVNAADAAALEHDKAYDQQLKAGDNPYLKYNHADAEFQERLKEDTSFGGNLGRAVFQAKKRLLEPLGLVEEAAKTAPGKKRPVEQSPQEPDSSAGIGKSGAQPAKKRLNFGQTGDTESVPDPQPIGEPPAAPSGVGSLTMASGGGAPVADNNEGADGVGSSSGNWHCDSQWLGDRVITTSTRTWALPTYNNHLYKQISNSTSGGSSNDNAYFGYSTPWGYFDFNRFHCHFSPRDWQRLINNNWGFRPKRLNFKLFNIQVKEVTDNNGVKTIANNLTSTVQVFTDSDYQLPYVLGSAHEGCLPPFPADVFMIPQYGYLTLNDGSQAVGRSSFYCLEYFPSQMLRTGNNFQFSYEFENVPFHSSYAHSQSLDRLMNPLIDQYLYYLSKTINGSGQNQQTLKFSVAGPSNMAVQGRNYIPGPSYRQQRVSTTVTQNNNSRFAWPGASSWALNGRNSLMNPGPAMASHKEGEDRFFPLSGSLIFGKQGTGRDNVDADKVMITNEEEIKTTNPVATESYGQVATNHQSAQAQAQTGWVQNQGILPGMVWQDRDVYLQGPIWAKIPHTDGNFHPSPLMGGFGMKHPPPQILIKNTPVPADPPTAFNKDKLNSFITQYSTGQVSVEIEWELQKENSKRWNPEIQYTSNYYKSNNVEFAVNTEGVYSEPRPIGTRYLTRNL

SEQ ID NO: 155 - DNA, 2208 bp, synthetic construct
  misc_feature 1..2208: note = Adeno Associated Virus Capsid Protein Variant
  source 1..2208: mol_type = other DNA
atggctgccgatggttatcttccagattggctcgaggacaaccttagtgaaggaattcgcgagtggtgggctttgaaacctggagcccctcaacccaaggcaaatcaacaacatcaagacaacgctcgaggtcttgtgcttccgggttacaaataccttggacccggcaacggactcgacaagggggagccggtcaacgcagcagacgcggcggccctcgagcacgacaaggcctacgaccagcagctcaaggccggagacaacccgtacctcaagtacaaccacgccgacgccgagttccaggagcggctcaaagaagatacgtcttttgggggcaacctcgggcgagcagtcttccaggccaaaaagaggcttcttgaacctcttggtctggttgaggaagcggctaagacggctcctggaaagaagaggcctgtagagcagtctcctcaggaaccggactcctccgcgggtattggcaaatcgggtgcacagcccgctaaaaagagactcaatttcggtcagactggcgacacagagtcagtcccagaccctcaaccaatcggagaacctcccgcagccccctcaggtgtgggatctcttacaatggcttcaggtggtggcgcaccagtggcagacaataacgaaggtgccgatggagtgggtagttcctcgggaaattggcattgcgattcccaatggctgggggacagagtcatcaccaccagcacccgaacctgggccctgcccacctacaacaatcacctctacaagcaaatctccaacagcacatctggaggatcttcaaatgacaacgcctacttcggctacagcaccccctgggggtattttgacttcaacagattccactgccacttctcaccacgtgactggcagcgactcatcaacaacaactggggattccggcctaagcgactcaacttcaagctcttcaacattcaggtcaaagaggttacggacaacaatggagtcaagaccatcgccaataaccttaccagcacggtccaggtcttcacggactcagactatcagctcccgtacgtgctcgggtcggctcacgagggctgcctcccgccgttcccagcggacgttttcatgattcctcagtacgggtatctgacgcttaatgatggaagccaggccgtgggtcgttcgtccttttactgcctggaatatttcccgtcgcaaatgctaagaacgggtaacaacttccagttcagctacgagtttgagaacgtacctttccatagcagctacgctcacagccaaagcctggaccgactaatgaatccactcatcgaccaatacttgtactatctctcaaagactattaacggttctggacagaatcaacaaacgctaaaattcagtgtggccggacccagcaacatggctgtccagggaagaaactacatacctggacccagctaccgacaacaacgtgtctcaaccactgtgactcaaaacaacaacagcgaatttgcttggcctggagcttcttcttgggctctcaatggacgtaatagcttgatgaatcctggacctgctatggccagccacaaagaaggagaggaccgtttctttcctttgtctggatctttaatttttggcaaacaaggaactggaagagacaacgtggatgcggacaaagtcatgataaccaacgaagaagaaattaaaactactaacccggtagcaacggagtcctatggacaagtggccacaaaccaccagagtgcccaagcacaggcgcagaccggctgggttcaaaaccaaggaatacttccgggtatggtttggcaggacagagatgtgtacctgcaaggacccatttgggccaaaattcctcacacggacggcaactttcacccttctccgctgatgggagggtttggaatgaagcacccgcctcctcagatcctcatcaaaaacacacctgtacctgcggatcctccaacggccttcaacaaggacaagctgaactctttcatcacccagtattctactggccaagtcagcgtggagatcgagtgggagctgcagaaggaaaacagcaagcgctggaacccggagatccagtacacttccaactattacaagtctgggaatgttgaatttgctgttaatactgaaggtgtatatagtgaaccccgccccattggcaccagatacctgactcgtaatctg

SEQ ID NO: 156 - protein, 736 aa, synthetic construct
  REGION 1..736: note = Adeno Associated Virus Capsid Protein Variant
MAADGYLPDWLEDNLSEGIREWWALKPGAPQPKANQQHQDNARGLVLPGYKYLGPGNGLDKGEPVNAADAAALEHDKAYDQQLKAGDNPYLKYNHADAEFQERLKEDTSFGGNLGRAVFQAKKRLLEPLGLVEEAAKTAPGKKRPVEQSPQEPDSSAGIGKSGAQPAKKRLNFGQTGDTESVPDPQPIGEPPAAPSGVGSLTMASGGGAPVADNNEGADGVGSSSGNWHCDSQWLGDRVITTSTRTWALPTYNNHLYKQISNSTSGGSSNDNAYFGYSTPWGYFDFNRFHCHFSPRDWQRLINNNWGFRPKRLNFKLFNIQVKEVTDNNGVKTIANNLTSTVQVFTDSDYQLPYVLGSAHEGCLPPFPADVFMIPQYGYLTLNDGSQAVGRSSFYCLEYFPSQMLRTGNNFQFSYEFENVPFHSSYAHSQSLDRLMNPLIDQYLYYLSKTINGSGQNQQTLKFSVAGPSNMAVQGRNYIPGPSYRQQRVSTTVTQNNNSEFAWPGASSWALNGRNSLMNPGPAMASHKEGEDRFFPLSGSLIFGKQGTGRDNVDADKVMITNEEEIKTTNPVATESYGQVATNHQSAQAQAQTGWVQNQGILPGMVWQDRDVYLQGPIWAKIPHTDGNFHPSPLMGGFGMKHPPPQILIKNTPVPADPPTAFNKDKLNSFITQYSTGQVSVEIEWELQKENSKRWNPEIQYTSNYYKSGNVEFAVNTEGVYSEPRPIGTRYLTRNL

SEQ ID NO: 157 - DNA, 2208 bp, synthetic construct
  misc_feature 1..2208: note = Adeno Associated Virus Capsid Protein Variant
  source 1..2208: mol_type = other DNA
atggctgccgatggttatcttccagattggctcgaggacaaccttagtgaaggaattcgcgagtggtgggctttgaaacctggagcccctcaacccaaggcaaatcaacaacatcaagacaacgctcgaggtcttgtgcttccgggttacaaataccttggacccggcaacggactcgacaagggggagccggtcaacgcagcagacgcggcggccctcgagcacgacaaggcctacgaccagcagctcaaggccggagacaacccgtacctcaagtacaaccacgccgacgccgagttccaggagcggctcaaagaagatacgtcttttgggggcaacctcgggcgagcagtcttccaggccaaaaagaggcttcttgaacctcttggtctggttgaggaagcggctaagacggctcctggaaagaagaggcctgtagagcagtctcctcaggaaccggactcctccgcgggtattggcaaatcgggtgcacagcccgctaaaaagagactcaatttcggtcagactggcgacacagagtcagtcccagaccctcaaccaatcggagaacctcccgcagccccctcaggtgtgggatctcttacaatggcttcaggtggtggcgcaccagtggcagacaataacgaaggtgccgatggagtgggtagttcctcgggaaattggcattgcgattcccaatggctgggggacagagtcatcaccaccagcacccgaacctgggccctgcccacctacaacaatcacctctacaagcaaatctccaacagcacatctggaggatcttcaaatgacaacgcctacttcggctacagcaccccctgggggtattttgacttcaacagattccactgccacttctcaccacgtgactggcagcgactcatcaacaacaactggggattccggcctaagcgactcaacttcaagctcttcaacattcaggtcaaagaggttacggacaacaatggagtcaagaccatcgccaataaccttaccagcacggtccaggtcttcacggactcagactatcagctcccgtacgtgctcgggtcggctcacgagggctgcctcccgccgttcccagcggacgttttcatgattcctcagtacgggtatctgacgcttaatgatggaagccaggccgtgggtcgttcgtccttttactgcctggaatatttcccgtcgcaaatgctaagaacgggtaacaacttccagttcagctacgagtttgagaacgtacctttccatagcagctacgctcacagccaaagcctggaccgactaatgaatccactcatcgaccaatacttgtactatctctcaaagactattaacggttctggacagaatcaacaaacgctaaaattcagtgtggccggacccagcaacatggctgtccagggaagaaactacatacctggacccagctaccgacaacaacgtgtctcaaccactgtgcttcaaaacaacaacagcgaatttgcttggcctggagcttcttcttgggctctcaatggacgtaatagcttgatgaatcctggacctgctatggccagccacaaagaaggagaggaccgtttctttcctttgtctggatctttaatttttggcaaacaaggaactggaagagacaacgtggatgcggacaaagtcatgataaccaacgaagaagaaattaaaactactaacccggtagcaacggagtcctatggacaagtggccacaaaccaccagagtgcccaagcacaggcgcagaccggctgggttcaaaaccaaggaatacttccgggtatggtttggcaggacagagatgtgtacctgcaaggacccatttgggccaaaattcctcacacggacggcaactttcacccttctccgctgatgggagggtttggaatgaagcacccgcctcctcagatcctcatcaaaaacacacctgtacctgcggatcctccaacggccttcaacaaggacaagctgaactctttcatcacccagtattctactggccaagtcagcgtggagatcgagtgggagctgcagaaggaaaacagcaagcgctggaacccggagatccagtacacttccaactattacaagtctaataatgttgaatttgctgttaatactgaaggtgtatatagtgaaccccgccccattggcaccagatacctgactcgtaatctg

SEQ ID NO: 158 - protein, 736 aa, synthetic construct
  REGION 1..736: note = Adeno Associated Virus Capsid Protein Variant
MAADGYLPDWLEDNLSEGIREWWALKPGAPQPKANQQHQDNARGLVLPGYKYLGPGNGLDKGEPVNAADAAALEHDKAYDQQLKAGDNPYLKYNHADAEFQERLKEDTSFGGNLGRAVFQAKKRLLEPLGLVEEAAKTAPGKKRPVEQSPQEPDSSAGIGKSGAQPAKKRLNFGQTGDTESVPDPQPIGEPPAAPSGVGSLTMASGGGAPVADNNEGADGVGSSSGNWHCDSQWLGDRVITTSTRTWALPTYNNHLYKQISNSTSGGSSNDNAYFGYSTPWGYFDFNRFHCHFSPRDWQRLINNNWGFRPKRLNFKLFNIQVKEVTDNNGVKTIANNLTSTVQVFTDSDYQLPYVLGSAHEGCLPPFPADVFMIPQYGYLTLNDGSQAVGRSSFYCLEYFPSQMLRTGNNFQFSYEFENVPFHSSYAHSQSLDRLMNPLIDQYLYYLSKTINGSGQNQQTLKFSVAGPSNMAVQGRNYIPGPSYRQQRVSTTVLQNNNSEFAWPGASSWALNGRNSLMNPGPAMASHKEGEDRFFPLSGSLIFGKQGTGRDNVDADKVMITNEEEIKTTNPVATESYGQVATNHQSAQAQAQTGWVQNQGILPGMVWQDRDVYLQGPIWAKIPHTDGNFHPSPLMGGFGMKHPPPQILIKNTPVPADPPTAFNKDKLNSFITQYSTGQVSVEIEWELQKENSKRWNPEIQYTSNYYKSNNVEFAVNTEGVYSEPRPIGTRYLTRNL

SEQ ID NO: 159 - DNA, 2208 bp, synthetic construct
  misc_feature 1..2208: note = Adeno Associated Virus Capsid Protein Variant
  source 1..2208: mol_type = other DNA
atggctgccgatggttatcttccagattggctcgaggacaaccttagtgaaggaattcgcgagtggtgggctttgaaacctggagcccctcaacccaaggcaaatcaacaacatcaagacaacgctcgaggtcttgtgcttccgggttacaaataccttggacccggcaacggactcgacaagggggagccggtcaacgcagcagacgcggcggccctcgagcacgacaaggcctacgaccagcagctcaaggccggagacaacccgtacctcaagtacaaccacgccgacgccgagttccaggagcggctcaaagaagatacgtcttttgggggcaacctcgggcgagcagtcttccaggccaaaaagaggcttcttgaacctcttggtctggttgaggaagcggctaagacggctcctggaaagaagaggcctgtagagcagtctcctcaggaaccggactcctccgcgggtattggcaaatcgggtgcacagcccgctaaaaagagactcaatttcggtcagactggcgacacagagtcagtcccagaccctcaaccaatcggagaacctcccgcagccccctcaggtgtgggatctcttacaatggcttcaggtggtggcgcaccagtggcagacaataacgaaggtgccgatggagtgggtagttcctcgggaaattggcattgcgattcccaatggctgggggacagagtcatcaccaccagcacccgaacctgggccctgcccacctacaacaatcacctctacaagcaaatctccaacagcacatctggaggatcttcaaatgacaacgcctacttcggctacagcaccccctgggggtattttgacttcaacagattccactgccacttctcaccacgtgactggcagcgactcatcaacaacaactggggattccggcctaagcgactcaacttcaagctcttcaacattcaggtcaaagaggttacggacaacaatggagtcaagaccatcgccaataaccttaccagcacggtccaggtcttcacggactcagactatcagctcccgtacgtgctcgggtcggctcacgagggctgcctcccgccgttcccagcggacgttttcatgattcctcagtacgggtatctgacgcttaatgatggaagccaggccgtgggtcgttcgtccttttactgcctggaatatttcccgtcgcaaatgctaagaacgggtaacaacttccagttcagctacgagtttgagaacgtacctttccatagcagctacgctcacagccaaagcctggaccgactaatgaatccactcatcgaccaatacttgtactatctctcaaagactattaacggttctggacagaatcaacaaacgctaaaattcagtgtggccggacccagcaacatggctgtccagggaagaaactacatacctggacccagctaccgacaacaacgtgtctcaaccactgtgacttttaacaacaacagcgaatttgcttggcctggagcttcttcttgggctctcaatggacgtaatagcttgatgaatcctggacctgctatggccagccacaaagaaggagaggaccgtttctttcctttgtctggatctttaatttttggcaaacaaggaactggaagagacaacgtggatgcggacaaagtcatgataaccaacgaagaagaaattaaaactactaacccggtagcaacggagtcctatggacaagtggccacaaaccaccagagtgcccaagcacaggcgcagaccggctgggttcaaaaccaaggaatacttccgggtatggtttggcaggacagagatgtgtacctgcaaggacccatttgggccaaaattcctcacacggacggcaactttcacccttctccgctgatgggagggtttggaatgaagcacccgcctcctcagatcctcatcaaaaacacacctgtacctgcggatcctccaacggccttcaacaaggacaagctgaactctttcatcacccagtattctactggccaagtcagcgtggagatcgagtgggagctgcagaaggaaaacagcaagcgctggaacccggagatccagtacacttccaactattacaagtctaataatgttgaatttgctgttaatactgaaggtgtatatagtgaaccccgccccattggcaccagatacctgactcgtaatctg

SEQ ID NO: 160 - protein, 736 aa, synthetic construct
  REGION 1..736: note = Adeno Associated Virus Capsid Protein Variant
MAADGYLPDWLEDNLSEGIREWWALKPGAPQPKANQQHQDNARGLVLPGYKYLGPGNGLDKGEPVNAADAAALEHDKAYDQQLKAGDNPYLKYNHADAEFQERLKEDTSFGGNLGRAVFQAKKRLLEPLGLVEEAAKTAPGKKRPVEQSPQEPDSSAGIGKSGAQPAKKRLNFGQTGDTESVPDPQPIGEPPAAPSGVGSLTMASGGGAPVADNNEGADGVGSSSGNWHCDSQWLGDRVITTSTRTWALPTYNNHLYKQISNSTSGGSSNDNAYFGYSTPWGYFDFNRFHCHFSPRDWQRLINNNWGFRPKRLNFKLFNIQVKEVTDNNGVKTIANNLTSTVQVFTDSDYQLPYVLGSAHEGCLPPFPADVFMIPQYGYLTLNDGSQAVGRSSFYCLEYFPSQMLRTGNNFQFSYEFENVPFHSSYAHSQSLDRLMNPLIDQYLYYLSKTINGSGQNQQTLKFSVAGPSNMAVQGRNYIPGPSYRQQRVSTTVTFNNNSEFAWPGASSWALNGRNSLMNPGPAMASHKEGEDRFFPLSGSLIFGKQGTGRDNVDADKVMITNEEEIKTTNPVATESYGQVATNHQSAQAQAQTGWVQNQGILPGMVWQDRDVYLQGPIWAKIPHTDGNFHPSPLMGGFGMKHPPPQILIKNTPVPADPPTAFNKDKLNSFITQYSTGQVSVEIEWELQKENSKRWNPEIQYTSNYYKSNNVEFAVNTEGVYSEPRPIGTRYLTRNL

SEQ ID NO: 161 - DNA, 2208 bp, synthetic construct
  misc_feature 1..2208: note = Adeno Associated Virus Capsid Protein Variant
  source 1..2208: mol_type = other DNA
atggctgccgatggttatcttccagattggctcgaggacaaccttagtgaaggaattcgcgagtggtgggctttgaaacctggagcccctcaacccaaggcaaatcaacaacatcaagacaacgctcgaggtcttgtgcttccgggttacaaataccttggacccggcaacggactcgacaagggggagccggtcaacgcagcagacgcggcggccctcgagcacgacaaggcctacgaccagcagctcaaggccggagacaacccgtacctcaagtacaaccacgccgacgccgagttccaggagcggctcaaagaagatacgtcttttgggggcaacctcgggcgagcagtcttccaggccaaaaagaggcttcttgaacctcttggtctggttgaggaagcggctaagacggctcctggaaagaagaggcctgtagagcagtctcctcaggaaccggactcctccgcgggtattggcaaatcgggtgcacagcccgctaaaaagagactcaatttcggtcagactggcgacacagagtcagtcccagaccctcaaccaatcggagaacctcccgcagccccctcaggtgtgggatctcttacaatggcttcaggtggtggcgcaccagtggcagacaataacgaaggtgccgatggagtgggtagttcctcgggaaattggcattgcgattcccaatggctgggggacagagtcatcaccaccagcacccgaacctgggccctgcccacctacaacaatcacctctacaagcaaatctccaacagcacatctggaggatcttcaaatgacaacgcctacttcggctacagcaccccctgggggtattttgacttcaacagattccactgccacttctcaccacgtgactggcagcgactcatcaacaacaactggggattccggcctaagcgactcaacttcaagctcttcaacattcaggtcaaagaggttacggacaacaatggagtcaagaccatcgccaataaccttaccagcacggtccaggtcttcacggactcagactatcagctcccgtacgtgctcgggtcggctcacgagggctgcctcccgccgttcccagcggacgttttcatgattcctcagtacgggtatctgacgcttaatgatggaagccaggccgtgggtcgttcgtccttttactgcctggaatatttcccgtcgcaaatgctaagaacgggtaacaacttccagttcagctacgagtttgagaacgtacctttccatagcagctacgctcacagccaaagcctggaccgactaatgaatccactcatcgaccaatacttgtactatctctcaaagactattaacggttctggacagaatcaacaaacgctaaaattcagtgtggccggacccagcaacatggctgtccagggaagaaactacatacctggacccagctaccgacaacaacgtgtctcaaccactgtgactcaaaacaacaacagcgaatttgcttggcctggagcttcttcttgggctctcaatggacgtaatagcttgatgaatcctggacctgctatggccagccacaaagaaggagaggaccgtttctttcctttgtctggatctttaatttttggcaaacaaggaactggaagagacaacgtggatgcggacaaagtcatgataaccaacgaagaagaaattaaaactactaacccggtagcaacggagtcctatggacaagtggccacaaaccaccagagtgcccaagcacaggcgcagaccggctgggttcaaaaccaaggaatacttccgggtatggtttggcaggacagagatgtgtacctgcaaggacccatttgggccaaaattcctcacacggacggcaactttcacccttctccgctgatgggagggtttggaatgaagcacccgcctcctcagatcctcatcaaaaacacacctgtacctgcggatcctaatacggccttcaacaaggacaagctgaactctttcatcacccagtattctactggccaagtcagcgtggagatcgagtgggagctgcagaaggaaaacagcaagcgctggaacccggagatccagtacacttccaactattacaagtctaataatgttgaatttgctgttaatactgaaggtgtatatagtgaaccccgccccattggcaccagatacctgactcgtaatctg

SEQ ID NO: 162 - protein, 736 aa, synthetic construct
  REGION 1..736: note = Adeno Associated Virus Capsid Protein Variant
MAADGYLPDWLEDNLSEGIREWWALKPGAPQPKANQQHQDNARGLVLPGYKYLGPGNGLDKGEPVNAADAAALEHDKAYDQQLKAGDNPYLKYNHADAEFQERLKEDTSFGGNLGRAVFQAKKRLLEPLGLVEEAAKTAPGKKRPVEQSPQEPDSSAGIGKSGAQPAKKRLNFGQTGDTESVPDPQPIGEPPAAPSGVGSLTMASGGGAPVADNNEGADGVGSSSGNWHCDSQWLGDRVITTSTRTWALPTYNNHLYKQISNSTSGGSSNDNAYFGYSTPWGYFDFNRFHCHFSPRDWQRLINNNWGFRPKRLNFKLFNIQVKEVTDNNGVKTIANNLTSTVQVFTDSDYQLPYVLGSAHEGCLPPFPADVFMIPQYGYLTLNDGSQAVGRSSFYCLEYFPSQMLRTGNNFQFSYEFENVPFHSSYAHSQSLDRLMNPLIDQYLYYLSKTINGSGQNQQTLKFSVAGPSNMAVQGRNYIPGPSYRQQRVSTTVTQNNNSEFAWPGASSWALNGRNSLMNPGPAMASHKEGEDRFFPLSGSLIFGKQGTGRDNVDADKVMITNEEEIKTTNPVATESYGQVATNHQSAQAQAQTGWVQNQGILPGMVWQDRDVYLQGPIWAKIPHTDGNFHPSPLMGGFGMKHPPPQILIKNTPVPADPNTAFNKDKLNSFITQYSTGQVSVEIEWELQKENSKRWNPEIQYTSNYYKSNNVEFAVNTEGVYSEPRPIGTRYLTRNL

SEQ ID NO: 163 - DNA, 2208 bp, synthetic construct
  misc_feature 1..2208: note = Adeno Associated Virus Capsid Protein Variant
  source 1..2208: mol_type = other DNA
atggctgccgatggttatcttccagattggctcgaggacaaccttagtgaaggaattcgcgagtggtgggctttgaaacctggagcccctcaacccaaggcaaatcaacaacatcaagacaacgctcgaggtcttgtgcttccgggttacaaataccttggacccggcaacggactcgacaagggggagccggtcaacgcagcagacgcggcggccctcgagcacgacaaggcctacgaccagcagctcaaggccggagacaacccgtacctcaagtacaaccacgccgacgccgagttccaggagcggctcaaagaagatacgtcttttgggggcaacctcgggcgagcagtcttccaggccaaaaagaggcttcttgaacctcttggtctggttgaggaagcggctaagacggctcctggaaagaagaggcctgtagagcagtctcctcaggaaccggactcctccgcgggtattggcaaatcgggtgcacagcccgctaaaaagagactcaatttcggtcagactggcgacacagagtcagtcccagaccctcaaccaatcggagaacctcccgcagccccctcaggtgtgggatctcttacaatggcttcaggtggtggcgcaccagtggcagacaataacgaaggtgccgatggagtgggtagttcctcgggaaattggcattgcgattcccaatggctgggggacagagtcatcaccaccagcacccgaacctgggccctgcccacctacaacaatcacctctacaagcaaatctccaacagcacatctggaggatcttcaaatgacaacgcctacttcggctacagcaccccctgggggtattttgacttcaacagattccactgccacttctcaccacgtgactggcagcgactcatcaacaacaactggggattccggcctaagcgactcaacttcaagctcttcaacattcaggtcaaagaggttacggacaacaatggagtcaagaccatcgccaataaccttaccagcacggtccaggtcttcacggactcagactatcagctcccgtacgtgctcgggtcggctcacgagggctgcctcccgccgttcccagcggacgttttcatgattcctcagtacgggtatctgacgcttaatgatggaagccaggccgtgggtcgttcgtccttttactgcctggaatatttcccgtcgcaaatgctaagaacgggtaacaacttccagttcagctacgagtttgagaacgtacctttccatagcagctacgctcacagccaaagcctggaccgactaatgaatccactcatcgaccaatacttgtactatctctcaaagactattaacggttctggacagaatcaacaaacgctaaaattcagtgtggccggacccagcaacatggctgtccagggaagaaactacatacctggacccagctaccgacaacaacgtgtctcaaccactgtgactcaaaacaacaacagcgaatttgcttggcctggagcttcttcttgggctctcaatggacgtaatagcttgatgaatcctggacctgctatggccagccacaaagaaggagaggaccgtttctttcctttgtctggatctttaatttttggcaaacaaggaactggaagagacaacgtggatgcggacaaagtcatgataaccaacgaagaagaaattaaaactactaacccggtagcaacggagtcctatggacaagtggccacaaacgttcagagtgcccaagcacaggcgcagaccggctgggttcaaaaccaaggaatacttccgggtatggtttggcaggacagagatgtgtacctgcaaggacccatttgggccaaaattcctcacacggacggcaactttcacccttctccgctgatgggagggtttggaatgaagcacccgcctcctcagatcctcatcaaaaacacacctgtacctgcggatcctccaacggccttcaacaaggacaagctgaactctttcatcacccagtattctactggccaagtcagcgtggagatcgagtgggagctgcagaaggaaaacagcaagcgctggaacccggagatccagtacacttccaactattacaagtctaataatgttgaatttgctgttaatactgaaggtgtatatagtgaaccccgccccattggcaccagatacctgactcgtaatctg

SEQ ID NO: 164 - protein, 736 aa, synthetic construct
  REGION 1..736: note = Adeno Associated Virus Capsid Protein Variant
MAADGYLPDWLEDNLSEGIREWWALKPGAPQPKANQQHQDNARGLVLPGYKYLGPGNGLDKGEPVNAADAAALEHDKAYDQQLKAGDNPYLKYNHADAEFQERLKEDTSFGGNLGRAVFQAKKRLLEPLGLVEEAAKTAPGKKRPVEQSPQEPDSSAGIGKSGAQPAKKRLNFGQTGDTESVPDPQPIGEPPAAPSGVGSLTMASGGGAPVADNNEGADGVGSSSGNWHCDSQWLGDRVITTSTRTWALPTYNNHLYKQISNSTSGGSSNDNAYFGYSTPWGYFDFNRFHCHFSPRDWQRLINNNWGFRPKRLNFKLFNIQVKEVTDNNGVKTIANNLTSTVQVFTDSDYQLPYVLGSAHEGCLPPFPADVFMIPQYGYLTLNDGSQAVGRSSFYCLEYFPSQMLRTGNNFQFSYEFENVPFHSSYAHSQSLDRLMNPLIDQYLYYLSKTINGSGQNQQTLKFSVAGPSNMAVQGRNYIPGPSYRQQRVSTTVTQNNNSEFAWPGASSWALNGRNSLMNPGPAMASHKEGEDRFFPLSGSLIFGKQGTGRDNVDADKVMITNEEEIKTTNPVATESYGQVATNVQSAQAQAQTGWVQNQGILPGMVWQDRDVYLQGPIWAKIPHTDGNFHPSPLMGGFGMKHPPPQILIKNTPVPADPPTAFNKDKLNSFITQYSTGQVSVEIEWELQKENSKRWNPEIQYTSNYYKSNNVEFAVNTEGVYSEPRPIGTRYLTRNL

SEQ ID NO: 165 - DNA, 2208 bp, synthetic construct
  misc_feature 1..2208: note = Adeno Associated Virus Capsid Protein Variant
  source 1..2208: mol_type = other DNA
atggctgccgatggttatcttccagattggctcgaggacaaccttagtgaaggaattcgcgagtggtgggctttgaaacctggagcccctcaacccaaggcaaatcaacaacatcaagacaacgctcgaggtcttgtgcttccgggttacaaataccttggacccggcaacggactcgacaagggggagccggtcaacgcagcagacgcggcggccctcgagcacgacaaggcctacgaccagcagctcaaggccggagacaacccgtacctcaagtacaaccacgccgacgccgagttccaggagcggctcaaagaagatacgtcttttgggggcaacctcgggcgagcagtcttccaggccaaaaagaggcttcttgaacctcttggtctggttgaggaagcggctaagacggctcctggaaagaagaggcctgtagagcagtctcctcaggaaccggactcctccgcgggtattggcaaatcgggtgcacagcccgctaaaaagagactcaatttcggtcagactggcgacacagagtcagtcccagaccctcaaccaatcggagaacctcccgcagccccctcaggtgtgggatctcttacaatggcttcaggtggtggcgcaccagtggcagacaataacgaaggtgccgatggagtgggtagttcctcgggaaattggcattgcgattcccaatggctgggggacagagtcatcaccaccagcacccgaacctgggccctgcccacctacaacaatcacctctacaagcaaatctccaacagcacatctggaggatcttcaaatgacaacgcctacttcggctacagcaccccctgggggtattttgacttcaacagattccactgccacttctcaccacgtgactggcagcgactcatcaacaacaactggggattccggcctaagcgactcaacttcaagctcttcaacattcaggtcaaagaggttacggacaacaatggagtcaagaccatcgccaataaccttaccagcacggtccaggtcttcacggactcagactatcagctcccgtacgtgctcgggtcggctcacgagggctgcctcccgccgttcccagcggacgttttcatgattcctcagtacgggtatctgacgcttaatgatggaagccaggccgtgggtcgttcgtccttttactgcctggaatatttcccgtcgcaaatgctaagaacgggtaacaacttccagttcagctacgagtttgagaacgtacctttccatagcagctacgctcacagccaaagcctggaccgactaatgaatccactcatcgaccaatacttgtactatctctcaaagactattaacggttctggacagaatcaacaaacgctaaaattcagtgtggccggacccagcaacatggctgtccagggaagaaactacatacctggacccagctaccgacaacaacgtgtctcaaccactacgactcaaaacaacaacagcgaatttgcttggcctggagcttcttcttgggctctcaatggacgtaatagcttgatgaatcctggacctgctatggccagccacaaagaaggagaggaccgtttctttcctttgtctggatctttaatttttggcaaacaaggaactggaagagacaacgtggatgcggacaaagtcatgataaccaacgaagaagaaattaaaactactaacccggtagcaacggagtcctatggacaagtggccacaaaccaccagagtgcccaagcacaggcgcagaccggctgggttcaaaaccaaggaatacttccgggtatggtttggcaggacagagatgtgtacctgcaaggacccatttgggccaaaattcctcacacggacggcaactttcacccttctccgctgatgggagggtttggaatgaagcacccgcctcctcagatcctcatcaaaaacacacctgtacctgcggatcctccaacggccttcaacaaggacaagctgaactctttcatcacccagtattctactggccaagtcagcgtggagatcgagtgggagctgcagaaggaaaacagcaagcgctggaacccggagatccagtacacttccaactattacaagtctaataatgttgaatttgctgttaatactgaaggtgtatatagtgaaccccgccccattggcaccagatacctgactcgtaatctg

SEQ ID NO: 166 - protein, 736 aa, synthetic construct
  REGION 1..736: note = Adeno Associated Virus Capsid Protein Variant
MAADGYLPDWLEDNLSEGIREWWALKPGAPQPKANQQHQDNARGLVLPGYKYLGPGNGLDKGEPVNAADAAALEHDKAYDQQLKAGDNPYLKYNHADAEFQERLKEDTSFGGNLGRAVFQAKKRLLEPLGLVEEAAKTAPGKKRPVEQSPQEPDSSAGIGKSGAQPAKKRLNFGQTGDTESVPDPQPIGEPPAAPSGVGSLTMASGGGAPVADNNEGADGVGSSSGNWHCDSQWLGDRVITTSTRTWALPTYNNHLYKQISNSTSGGSSNDNAYFGYSTPWGYFDFNRFHCHFSPRDWQRLINNNWGFRPKRLNFKLFNIQVKEVTDNNGVKTIANNLTSTVQVFTDSDYQLPYVLGSAHEGCLPPFPADVFMIPQYGYLTLNDGSQAVGRSSFYCLEYFPSQMLRTGNNFQFSYEFENVPFHSSYAHSQSLDRLMNPLIDQYLYYLSKTINGSGQNQQTLKFSVAGPSNMAVQGRNYIPGPSYRQQRVSTTTTQNNNSEFAWPGASSWALNGRNSLMNPGPAMASHKEGEDRFFPLSGSLIFGKQGTGRDNVDADKVMITNEEEIKTTNPVATESYGQVATNHQSAQAQAQTGWVQNQGILPGMVWQDRDVYLQGPIWAKIPHTDGNFHPSPLMGGFGMKHPPPQILIKNTPVPADPPTAFNKDKLNSFITQYSTGQVSVEIEWELQKENSKRWNPEIQYTSNYYKSNNVEFAVNTEGVYSEPRPIGTRYLTRNL

SEQ ID NO: 167 - DNA, 2208 bp, synthetic construct
  misc_feature 1..2208: note = Adeno Associated Virus Capsid Protein Variant
  source 1..2208: mol_type = other DNA
atggctgccgatggttatcttccagattggctcgaggacaaccttagtgaaggaattcgcgagtggtgggctttgaaacctggagcccctcaacccaaggcaaatcaacaacatcaagacaacgctcgaggtcttgtgcttccgggttacaaataccttggacccggcaacggactcgacaagggggagccggtcaacgcagcagacgcggcggccctcgagcacgacaaggcctacgaccagcagctcaaggccggagacaacccgtacctcaagtacaaccacgccgacgccgagttccaggagcggctcaaagaagatacgtcttttgggggcaacctcgggcgagcagtcttccaggccaaaaagaggcttcttgaacctcttggtctggttgaggaagcggctaagacggctcctggaaagaagaggcctgtagagcagtctcctcaggaaccggactcctccgcgggtattggcaaatcgggtgcacagcccgctaaaaagagactcaatttcggtcagactggcgacacagagtcagtcccagaccctcaaccaatcggagaacctcccgcagccccctcaggtgtgggatctcttacaatggcttcaggtggtggcgcaccagtggcagacaataacgaaggtgccgatggagtgggtagttcctcgggaaattggcattgcgattcccaatggctgggggacagagtcatcaccaccagcacccgaacctgggccctgcccacctacaacaatcacctctacaagcaaatctccaacagcacatctggaggatcttcaaatgacaacgcctacttcggctacagcaccccctgggggtattttgacttcaacagattccactgccacttctcaccacgtgactggcagcgactcatcaacaacaactggggattccggcctaagcgactcaacttcaagctcttcaacattcaggtcaaagaggttacggacaacaatggagtcaagaccatcgccaataaccttaccagcacggtccaggtcttcacggactcagactatcagctcccgtacgtgctcgggtcggctcacgagggctgcctcccgccgttcccagcggacgttttcatgattcctcagtacgggtatctgacgcttaatgatggaagccaggccgtgggtcgttcgtccttttactgcctggaatatttcccgtcgcaaatgctaagaacgggtaacaacttccagttcagctacgagtttgagaacgtacctttccatagcagctacgctcacagccaaagcctggaccgactaatgaatccactcatcgaccaatacttgtactatctctcaaagactattaacggttctggacagaatcaacaaacgctaaaattcagtgtggccggacccagcaacatggctgtccagggaagaaactacatacctggacccagctaccgacaacaacgtgtctcaaccactgtgactcaaaacaacaacagcgaatttgcttggccttatgcttcttcttgggctctcaatggacgtaatagcttgatgaatcctggacctgctatggccagccacaaagaaggagaggaccgtttctttcctttgtctggatctttaatttttggcaaacaaggaactggaagagacaacgtggatgcggacaaagtcatgataaccaacgaagaagaaattaaaactactaacccggtagcaacggagtcctatggacaagtggccacaaaccaccagagtgcccaagcacaggcgcagaccggctgggttcaaaaccaaggaatacttccgggtatggtttggcaggacagagatgtgtacctgcaaggacccatttgggccaaaattcctcacacggacggcaactttcacccttctccgctgatgggagggtttggaatgaagcacccgcctcctcagatcctcatcaaaaacacacctgtacctgcggatcctccaacggccttcaacaaggacaagctgaactctttcatcacccagtattctactggccaagtcagcgtggagatcgagtgggagctgcagaaggaaaacagcaagcgctggaacccggagatccagtacacttccaactattacaagtctaataatgttgaatttgctgttaatactgaaggtgtatatagtgaaccccgccccattggcaccagatacctgactcgtaatctg

SEQ ID NO: 168 - protein, 736 aa, synthetic construct
  REGION 1..736: note = Adeno Associated Virus Capsid Protein Variant
MAADGYLPDWLEDNLSEGIREWWALKPGAPQPKANQQHQDNARGLVLPGYKYLGPGNGLDKGEPVNAADAAALEHDKAYDQQLKAGDNPYLKYNHADAEFQERLKEDTSFGGNLGRAVFQAKKRLLEPLGLVEEAAKTAPGKKRPVEQSPQEPDSSAGIGKSGAQPAKKRLNFGQTGDTESVPDPQPIGEPPAAPSGVGSLTMASGGGAPVADNNEGADGVGSSSGNWHCDSQWLGDRVITTSTRTWALPTYNNHLYKQISNSTSGGSSNDNAYFGYSTPWGYFDFNRFHCHFSPRDWQRLINNNWGFRPKRLNFKLFNIQVKEVTDNNGVKTIANNLTSTVQVFTDSDYQLPYVLGSAHEGCLPPFPADVFMIPQYGYLTLNDGSQAVGRSSFYCLEYFPSQMLRTGNNFQFSYEFENVPFHSSYAHSQSLDRLMNPLIDQYLYYLSKTINGSGQNQQTLKFSVAGPSNMAVQGRNYIPGPSYRQQRVSTTVTQNNNSEFAWPYASSWALNGRNSLMNPGPAMASHKEGEDRFFPLSGSLIFGKQGTGRDNVDADKVMITNEEEIKTTNPVATESYGQVATNHQSAQAQAQTGWVQNQGILPGMVWQDRDVYLQGPIWAKIPHTDGNFHPSPLMGGFGMKHPPPQILIKNTPVPADPPTAFNKDKLNSFITQYSTGQVSVEIEWELQKENSKRWNPEIQYTSNYYKSNNVEFAVNTEGVYSEPRPIGTRYLTRNL

SEQ ID NO: 169 - DNA, 2208 bp, synthetic construct
  misc_feature 1..2208: note = Adeno Associated Virus Capsid Protein Variant
  source 1..2208: mol_type = other DNA
atggctgccgatggttatcttccagattggctcgaggacaaccttagtgaaggaattcgcgagtggtgggctttgaaacctggagcccctcaacccaaggcaaatcaacaacatcaagacaacgctcgaggtcttgtgcttccgggttacaaataccttggacccggcaacggactcgacaagggggagccggtcaacgcagcagacgcggcggccctcgagcacgacaaggcctacgaccagcagctcaaggccggagacaacccgtacctcaagtacaaccacgccgacgccgagttccaggagcggctcaaagaagatacgtcttttgggggcaacctcgggcgagcagtcttccaggccaaaaagaggcttcttgaacctcttggtctggttgaggaagcggctaagacggctcctggaaagaagaggcctgtagagcagtctcctcaggaaccggactcctccgcgggtattggcaaatcgggtgcacagcccgctaaaaagagactcaatttcggtcagactggcgacacagagtcagtcccagaccctcaaccaatcggagaacctcccgcagccccctcaggtgtgggatctcttacaatggcttcaggtggtggcgcaccagtggcagacaataacgaaggtgccgatggagtgggtagttcctcgggaaattggcattgcgattcccaatggctgggggacagagtcatcaccaccagcacccgaacctgggccctgcccacctacaacaatcacctctacaagcaaatctccaacagcacatctggaggatcttcaaatgacaacgcctacttcggctacagcaccccctgggggtattttgacttcaacagattccactgccacttctcaccacgtgactggcagcgactcatcaacaacaactggggattccggcctaagcgactcaacttcaagctcttcaacattcaggtcaaagaggttacggacaacaatggagtcaagaccatcgccaataaccttaccagcacggtccaggtcttcacggactcagactatcagctcccgtacgtgctcgggtcggctcacgagggctgcctcccgccgttcccagcggacgttttcatgattcctcagtacgggtatctgacgcttaatgatggaagccaggccgtgggtcgttcgtccttttactgcctggaatatttcccgtcgcaaatgctaagaacgggtaacaacttccagttcagctacgagtttgagaacgtacctttccatagcagctacgctcacagccaaagcctggaccgactaatgaatccactcatcgaccaatacttgtactatctctcaaagactattaacggttctggacagaatcaacaaacgctaaaattcagtgtggccggacccagcaacatggctgtccagggaagaaactacatacctggacccagctaccgacaacaacgtgtctcaaccactgtgactcaaaacaacaacagcgaatttgcttggcctggagcttcttcttgggctctcaatggacgtaatagcttgatgaatcctggacctgctatggccagccacaaagaaggagaggaccgtttctttcctttgtctggatctttaatttttggcaaacaaggaactggaagagacaacgtggatgcggacaaagtcatgataaccaacgaagaagaaattaaaactactaacccggtagcaacggagtcctatggacaagtggccacaaaccaccagagtgcccaagcacaggcgcagaccggctgggttcaaaaccaaggaatacttccgggtatggtttggcaggacagagatgtgtacctgcaaggacccatttgggccaaaattcctcacacggacggcaactttcacccttctccgctgatgggagggtttggaatgaagcacccgcctcctcagatcctcatcaaaaacacacctgtacctgcggatcctccaacggccttcaacaaggacaagctgtgttctttcatcacccagtattctactggccaagtcagcgtggagatcgagtgggagctgcagaaggaaaacagcaagcgctggaacccggagatccagtacacttccaactattacaagtctaataatgttgaatttgctgttaatactgaaggtgtatatagtgaaccccgccccattggcaccagatacctgactcgtaatctg

SEQ ID NO: 170 - protein, 736 aa, synthetic construct
  REGION 1..736: note = Adeno Associated Virus Capsid Protein Variant
MAADGYLPDWLEDNLSEGIREWWALKPGAPQPKANQQHQDNARGLVLPGYKYLGPGNGLDKGEPVNAADAAALEHDKAYDQQLKAGDNPYLKYNHADAEFQERLKEDTSFGGNLGRAVFQAKKRLLEPLGLVEEAAKTAPGKKRPVEQSPQEPDSSAGIGKSGAQPAKKRLNFGQTGDTESVPDPQPIGEPPAAPSGVGSLTMASGGGAPVADNNEGADGVGSSSGNWHCDSQWLGDRVITTSTRTWALPTYNNHLYKQISNSTSGGSSNDNAYFGYSTPWGYFDFNRFHCHFSPRDWQRLINNNWGFRPKRLNFKLFNIQVKEVTDNNGVKTIANNLTSTVQVFTDSDYQLPYVLGSAHEGCLPPFPADVFMIPQYGYLTLNDGSQAVGRSSFYCLEYFPSQMLRTGNNFQFSYEFENVPFHSSYAHSQSLDRLMNPLIDQYLYYLSKTINGSGQNQQTLKFSVAGPSNMAVQGRNYIPGPSYRQQRVSTTVTQNNNSEFAWPGASSWALNGRNSLMNPGPAMASHKEGEDRFFPLSGSLIFGKQGTGRDNVDADKVMITNEEEIKTTNPVATESYGQVATNHQSAQAQAQTGWVQNQGILPGMVWQDRDVYLQGPIWAKIPHTDGNFHPSPLMGGFGMKHPPPQILIKNTPVPADPPTAFNKDKLCSFITQYSTGQVSVEIEWELQKENSKRWNPEIQYTSNYYKSNNVEFAVNTEGVYSEPRPIGTRYLTRNL

SEQ ID NO: 171 - DNA, 2208 bp, synthetic construct
  misc_feature 1..2208: note = Adeno Associated Virus Capsid Protein Variant
  source 1..2208: mol_type = other DNA
atggctgccgatggttatcttccagattggctcgaggacaaccttagtgaaggaattcgcgagtggtgggctttgaaacctggagcccctcaacccaaggcaaatcaacaacatcaagacaacgctcgaggtcttgtgcttccgggttacaaataccttggacccggcaacggactcgacaagggggagccggtcaacgcagcagacgcggcggccctcgagcacgacaaggcctacgaccagcagctcaaggccggagacaacccgtacctcaagtacaaccacgccgacgccgagttccaggagcggctcaaagaagatacgtcttttgggggcaacctcgggcgagcagtcttccaggccaaaaagaggcttcttgaacctcttggtctggttgaggaagcggctaagacggctcctggaaagaagaggcctgtagagcagtctcctcaggaaccggactcctccgcgggtattggcaaatcgggtgcacagcccgctaaaaagagactcaatttcggtcagactggcgacacagagtcagtcccagaccctcaaccaatcggagaacctcccgcagccccctcaggtgtgggatctcttacaatggcttcaggtggtggcgcaccagtggcagacaataacgaaggtgccgatggagtgggtagttcctcgggaaattggcattgcgattcccaatggctgggggacagagtcatcaccaccagcacccgaacctgggccctgcccacctacaacaatcacctctacaagcaaatctccaacagcacatctggaggatcttcaaatgacaacgcctacttcggctacagcaccccctgggggtattttgacttcaacagattccactgccacttctcaccacgtgactggcagcgactcatcaacaacaactggggattccggcctaagcgactcaacttcaagctcttcaacattcaggtcaaagaggttacggacaacaatggagtcaagaccatcgccaataaccttaccagcacggtccaggtcttcacggactcagactatcagctcccgtacgtgctcgggtcggctcacgagggctgcctcccgccgttcccagcggacgttttcatgattcctcagtacgggtatctgacgcttaatgatggaagccaggccgtgggtcgttcgtccttttactgcctggaatatttcccgtcgcaaatgctaagaacgggtaacaacttccagttcagctacgagtttgagaacgtacctttccatagcagctacgctcacagccaaagcctggaccgactaatgaatccactcatcgaccaatacttgtactatctctcaaagactattaacggttctggacagaatcaacaaacgctaaaattcagtgtggccggacccagcaacatggctgtccagggaagaaactacatacctggacccagctaccgacaacaacgtgtctcaaccactgtgactcaaaacaacaacagcgaatttgcttggcctggagcttcttcttgggctctcaatggacgtaatagcttgatgaatcctggacctgctatggccagccacaaagaaggagaggaccgtttctttcctttgtctggatctttaatttttggcaaacaacatactggaagagacaacgtggatgcggacaaagtcatgataaccaacgaagaagaaattaaaactactaacccggtagcaacggagtcctatggacaagtggccacaaaccaccagagtgcccaagcacaggcgcagaccggctgggttcaaaaccaaggaatacttccgggtatggtttggcaggacagagatgtgtacctgcaaggacccatttgggccaaaattcctcacacggacggcaactttcacccttctccgctgatgggagggtttggaatgaagcacccgcctcctcagatcctcatcaaaaacacacctgtacctgcggatcctccaacggccttcaacaaggacaagctgaactctttcatcacccagtattctactggccaagtcagcgtggagatcgagtgggagctgcagaaggaaaacagcaagcgctggaacccggagatccagtacacttccaactattacaagtctaataatgttgaatttgctgttaatactgaaggtgtatatagtgaaccccgccccattggcaccagatacctgactcgtaatctg

SEQ ID NO: 172 - protein, 736 aa, synthetic construct
  REGION 1..736: note = Adeno Associated Virus Capsid Protein Variant
MAADGYLPDWLEDNLSEGIREWWALKPGAPQPKANQQHQDNARGLVLPGYKYLGPGNGLDKGEPVNAADAAALEHDKAYDQQLKAGDNPYLKYNHADAEFQERLKEDTSFGGNLGRAVFQAKKRLLEPLGLVEEAAKTAPGKKRPVEQSPQEPDSSAGIGKSGAQPAKKRLNFGQTGDTESVPDPQPIGEPPAAPSGVGSLTMASGGGAPVADNNEGADGVGSSSGNWHCDSQWLGDRVITTSTRTWALPTYNNHLYKQISNSTSGGSSNDNAYFGYSTPWGYFDFNRFHCHFSPRDWQRLINNNWGFRPKRLNFKLFNIQVKEVTDNNGVKTIANNLTSTVQVFTDSDYQLPYVLGSAHEGCLPPFPADVFMIPQYGYLTLNDGSQAVGRSSFYCLEYFPSQMLRTGNNFQFSYEFENVPFHSSYAHSQSLDRLMNPLIDQYLYYLSKTINGSGQNQQTLKFSVAGPSNMAVQGRNYIPGPSYRQQRVSTTVTQNNNSEFAWPGASSWALNGRNSLMNPGPAMASHKEGEDRFFPLSGSLIFGKQHTGRDNVDADKVMITNEEEIKTTNPVATESYGQVATNHQSAQAQAQTGWVQNQGILPGMVWQDRDVYLQGPIWAKIPHTDGNFHPSPLMGGFGMKHPPPQILIKNTPVPADPPTAFNKDKLNSFITQYSTGQVSVEIEWELQKENSKRWNPEIQYTSNYYKSNNVEFAVNTEGVYSEPRPIGTRYLTRNL

SEQ ID NO: 173 - DNA, 2208 bp, synthetic construct
  misc_feature 1..2208: note = Adeno Associated Virus Capsid Protein Variant
  source 1..2208: mol_type = other DNA
atggctgccgatggttatcttccagattggctcgaggacaaccttagtgaaggaattcgcgagtggtgggctttgaaacctggagcccctcaacccaaggcaaatcaacaacatcaagacaacgctcgaggtcttgtgcttccgggttacaaataccttggacccggcaacggactcgacaagggggagccggtcaacgcagcagacgcggcggccctcgagcacgacaaggcctacgaccagcagctcaaggccggagacaacccgtacctcaagtacaaccacgccgacgccgagttccaggagcggctcaaagaagatacgtcttttgggggcaacctcgggcgagcagtcttccaggccaaaaagaggcttcttgaacctcttggtctggttgaggaagcggctaagacggctcctggaaagaagaggcctgtagagcagtctcctcaggaaccggactcctccgcgggtattggcaaatcgggtgcacagcccgctaaaaagagactcaatttcggtcagactggcgacacagagtcagtcccagaccctcaaccaatcggagaacctcccgcagccccctcaggtgtgggatctcttacaatggcttcaggtggtggcgcaccagtggcagacaataacgaaggtgccgatggagtgggtagttcctcgggaaattggcattgcgattcccaatggctgggggacagagtcatcaccaccagcacccgaacctgggccctgcccacctacaacaatcacctctacaagcaaatctccaacagcacatctggaggatcttcaaatgacaacgcctacttcggctacagcaccccctgggggtattttgacttcaacagattccactgccacttctcaccacgtgactggcagcgactcatcaacaacaactggggattccggcctaagcgactcaacttcaagctcttcaacattcaggtcaaagaggttacggacaacaatggagtcaagaccatcgccaataaccttaccagcacggtccaggtcttcacggactcagactatcagctcccgtacgtgctcgggtcggctcacgagggctgcctcccgccgttcccagcggacgttttcatgattcctcagtacgggtatctgacgcttaatgatggaagccaggccgtgggtcgttcgtccttttactgcctggaatatttcccgtcgcaaatgctaagaacgggtaacaacttccagttcagctacgagtttgagaacgtacctttccatagcagctacgctcacagccaaagcctggaccgactaatgaatccactcatcgaccaatacttgtactatctctcaaagactattaacggttctggacagaatcaacaaacgctaaaattcagtgtggccggacccagcaacatggctgtccagggaagaaactacatacctggacccagctaccgacaacaacgtgtctcaaccactgtgactcaaaacaacaacagcgaatttgcttggcctggagcttcttcttgggctctcaatggacgtaatagcttgatgaatcctggacctgctatggccagccacaaagaaggagaggaccgtttctttcctttgtctggatctttaatttttggcaaacaaggaactggaagagacaacgtggatgcggacaaagtcatgataaccaacgaagaagaaattaaaactactaacccggtagcaacggagtcctatggacaagtggccacaaaccaccagagtgcccaaaggcaggcgcagaccggctgggttcaaaaccaaggaatacttccgggtatggtttggcaggacagagatgtgtacctgcaaggacccatttgggccaaaattcctcacacggacggcaactttcacccttctccgctgatgggagggtttggaatgaagcacccgcctcctcagatcctcatcaaaaacacacctgtacctgcggatcctccaacggccttcaacaaggacaagctgaactctttcatcacccagtattctactggccaagtcagcgtggagatcgagtgggagctgcagaaggaaaacagcaagcgctggaacccggagatccagtacacttccaactattacaagtctaataatgttgaatttgctgttaatactgaaggtgtatatagtgaaccccgccccattggcaccagatacctgactcgtaatctg

SEQ ID NO: 174 - protein, 736 aa, synthetic construct
  REGION 1..736: note = Adeno Associated Virus Capsid Protein Variant
MAADGYLPDWLEDNLSEGIREWWALKPGAPQPKANQQHQDNARGLVLPGYKYLGPGNGLDKGEPVNAADAAALEHDKAYDQQLKAGDNPYLKYNHADAEFQERLKEDTSFGGNLGRAVFQAKKRLLEPLGLVEEAAKTAPGKKRPVEQSPQEPDSSAGIGKSGAQPAKKRLNFGQTGDTESVPDPQPIGEPPAAPSGVGSLTMASGGGAPVADNNEGADGVGSSSGNWHCDSQWLGDRVITTSTRTWALPTYNNHLYKQISNSTSGGSSNDNAYFGYSTPWGYFDFNRFHCHFSPRDWQRLINNNWGFRPKRLNFKLFNIQVKEVTDNNGVKTIANNLTSTVQVFTDSDYQLPYVLGSAHEGCLPPFPADVFMIPQYGYLTLNDGSQAVGRSSFYCLEYFPSQMLRTGNNFQFSYEFENVPFHSSYAHSQSLDRLMNPLIDQYLYYLSKTINGSGQNQQTLKFSVAGPSNMAVQGRNYIPGPSYRQQRVSTTVTQNNNSEFAWPGASSWALNGRNSLMNPGPAMASHKEGEDRFFPLSGSLIFGKQGTGRDNVDADKVMITNEEEIKTTNPVATESYGQVATNHQSAQRQAQTGWVQNQGILPGMVWQDRDVYLQGPIWAKIPHTDGNFHPSPLMGGFGMKHPPPQILIKNTPVPADPPTAFNKDKLNSFITQYSTGQVSVEIEWELQKENSKRWNPEIQYTSNYYKSNNVEFAVNTEGVYSEPRPIGTRYLTRNL

SEQ ID NO: 175 - DNA, 2208 bp, synthetic construct
  misc_feature 1..2208: note = Adeno Associated Virus Capsid Protein Variant
  source 1..2208: mol_type = other DNA
atggctgccgatggttatcttccagattggctcgaggacaaccttagtgaaggaattcgcgagtggtgggctttgaaacctggagcccctcaacccaaggcaaatcaacaacatcaagacaacgctcgaggtcttgtgcttccgggttacaaataccttggacccggcaacggactcgacaagggggagccggtcaacgcagcagacgcggcggccctcgagcacgacaaggcctacgaccagcagctcaaggccggagacaacccgtacctcaagtacaaccacgccgacgccgagttccaggagcggctcaaagaagatacgtcttttgggggcaacctcgggcgagcagtcttccaggccaaaaagaggcttcttgaacctcttggtctggttgaggaagcggctaagacggctcctggaaagaagaggcctgtagagcagtctcctcaggaaccggactcctccgcgggtattggcaaatcgggtgcacagcccgctaaaaagagactcaatttcggtcagactggcgacacagagtcagtcccagaccctcaaccaatcggagaacctcccgcagccccctcaggtgtgggatctcttacaatggcttcaggtggtggcgcaccagtggcagacaataacgaaggtgccgatggagtgggtagttcctcgggaaattggcattgcgattcccaatggctgggggacagagtcatcaccaccagcacccgaacctgggccctgcccacctacaacaatcacctctacaagcaaatctccaacagcacatctggaggatcttcaaatgacaacgcctacttcggctacagcaccccctgggggtattttgacttcaacagattccactgccacttctcaccacgtgactggcagcgactcatcaacaacaactggggattccggcctaagcgactcaacttcaagctcttcaacattcaggtcaaagaggttacggacaacaatggagtcaagaccatcgccaataaccttaccagcacggtccaggtcttcacggactcagactatcagctcccgtacgtgctcgggtcggctcacgagggctgcctcccgccgttcccagcggacgttttcatgattcctcagtacgggtatctgacgcttaatgatggaagccaggccgtgggtcgttcgtccttttactgcctggaatatttcccgtcgcaaatgctaagaacgggtaacaacttccagttcagctacgagtttgagaacgtacctttccatagcagctacgctcacagccaaagcctggaccgactaatgaatccactcatcgaccaatacttgtactatctctcaaagactattaacggttctggacagaatcaacaaacgctaaaattcagtgtggccggacccagcaacatggctgtccagggaagaaactacatacctggacccagctaccgacaacaacgtgtctcaaccactgtgactcaaaacaacaacagcgaatttgcttggcctggagcttcttcttgggctctcaatggacgtaatagcttgatgaatcctggacctgctatggccagccacaaagaaggagaggaccgtttctttcctttgtctggatctttaatttttggcaaacaaggaactggaagagacaacgtggatgcggacaaagtcatgataaccaacgaagaagaaattaaaactactaacccggtagcaacggagtcctatggacaagtggccacaaacttgcagagtgcccaagcacaggcgcagaccggctgggttcaaaaccaaggaatacttccgggtatggtttggcaggacagagatgtgtacctgcaaggacccatttgggccaaaattcctcacacggacggcaactttcacccttctccgctgatgggagggtttggaatgaagcacccgcctcctcagatcctcatcaaaaacacacctgtacctgcggatcctccaacggccttcaacaaggacaagctgaactctttcatcacccagtattctactggccaagtcagcgtggagatcgagtgggagctgcagaaggaaaacagcaagcgctggaacccggagatccagtacacttccaactattacaagtctaataatgttgaatttgctgttaatactgaaggtgtatatagtgaaccccgccccattggcaccagatacctgactcgtaatctg

SEQ ID NO: 176 - protein, 736 aa, synthetic construct
  REGION 1..736: note = Adeno Associated Virus Capsid Protein Variant
MAADGYLPDWLEDNLSEGIREWWALKPGAPQPKANQQHQDNARGLVLPGYKYLGPGNGLDKGEPVNAADAAALEHDKAYDQQLKAGDNPYLKYNHADAEFQERLKEDTSFGGNLGRAVFQAKKRLLEPLGLVEEAAKTAPGKKRPVEQSPQEPDSSAGIGKSGAQPAKKRLNFGQTGDTESVPDPQPIGEPPAAPSGVGSLTMASGGGAPVADNNEGADGVGSSSGNWHCDSQWLGDRVITTSTRTWALPTYNNHLYKQISNSTSGGSSNDNAYFGYSTPWGYFDFNRFHCHFSPRDWQRLINNNWGFRPKRLNFKLFNIQVKEVTDNNGVKTIANNLTSTVQVFTDSDYQLPYVLGSAHEGCLPPFPADVFMIPQYGYLTLNDGSQAVGRSSFYCLEYFPSQMLRTGNNFQFSYEFENVPFHSSYAHSQSLDRLMNPLIDQYLYYLSKTINGSGQNQQTLKFSVAGPSNMAVQGRNYIPGPSYRQQRVSTTVTQNNNSEFAWPGASSWALNGRNSLMNPGPAMASHKEGEDRFFPLSGSLIFGKQGTGRDNVDADKVMITNEEEIKTTNPVATESYGQVATNLQSAQAQAQTGWVQNQGILPGMVWQDRDVYLQGPIWAKIPHTDGNFHPSPLMGGFGMKHPPPQILIKNTPVPADPPTAFNKDKLNSFITQYSTGQVSVEIEWELQKENSKRWNPEIQYTSNYYKSNNVEFAVNTEGVYSEPRPIGTRYLTRNL

SEQ ID NO: 177 - DNA, 2208 bp, synthetic construct
  misc_feature 1..2208: note = Adeno Associated Virus Capsid Protein Variant
  source 1..2208: mol_type = other DNA
atggctgccgatggttatcttccagattggctcgaggacaaccttagtgaaggaattcgcgagtggtgggctttgaaacctggagcccctcaacccaaggcaaatcaacaacatcaagacaacgctcgaggtcttgtgcttccgggttacaaataccttggacccggcaacggactcgacaagggggagccggtcaacgcagcagacgcggcggccctcgagcacgacaaggcctacgaccagcagctcaaggccggagacaacccgtacctcaagtacaaccacgccgacgccgagttccaggagcggctcaaagaagatacgtcttttgggggcaacctcgggcgagcagtcttccaggccaaaaagaggcttcttgaacctcttggtctggttgaggaagcggctaagacggctcctggaaagaagaggcctgtagagcagtctcctcaggaaccggactcctccgcgggtattggcaaatcgggtgcacagcccgctaaaaagagactcaatttcggtcagactggcgacacagagtcagtcccagaccctcaaccaatcggagaacctcccgcagccccctcaggtgtgggatctcttacaatggcttcaggtggtggcgcaccagtggcagacaataacgaaggtgccgatggagtgggtagttcctcgggaaattggcattgcgattcccaatggctgggggacagagtcatcaccaccagcacccgaacctgggccctgcccacctacaacaatcacctctacaagcaaatctccaacagcacatctggaggatcttcaaatgacaacgcctacttcggctacagcaccccctgggggtattttgacttcaacagattccactgccacttctcaccacgtgactggcagcgactcatcaacaacaactggggattccggcctaagcgactcaacttcaagctcttcaacattcaggtcaaagaggttacggacaacaatggagtcaagaccatcgccaataaccttaccagcacggtccaggtcttcacggactcagactatcagctcccgtacgtgctcgggtcggctcacgagggctgcctcccgccgttcccagcggacgttttcatgattcctcagtacgggtatctgacgcttaatgatggaagccaggccgtgggtcgttcgtccttttactgcctggaatatttcccgtcgcaaatgctaagaacgggtaacaacttccagttcagctacgagtttgagaacgtacctttccatagcagctacgctcacagccaaagcctggaccgactaatgaatccactcatcgaccaatacttgtactatctctcaaagactattaacggttctggacagaatcaacaaacgctaaaattcagtgtggccggacccagcaacatggctgtccagggaagaaactacatacctggacccagctaccgacaacaacgtgtctcaaccactgtgactcaaaacaacaacagcgaatttgcttggcctggagcttcttcttgggctctcaatggacgtaatagcttgatgaatcctggacctgctatggccagccacaaagaaggagaggaccgtttctttcctttgtctggatctttaatttttggcaaacaaggaactggaagagacaacgtggatgcggacaaagtcatgataaccaacgaagaagaaattaaaactactaacccggtagcaacggagtcctatggacaagtggccacaaaccaccagagtgcccaagcacaggcgcagaccggctgggttcaaaaccaaggaatacttccgggtatggtttggcaggacagagatgtgtacctgcaaggacccatttgggccaaaattcctcacacggacggcaactttcacccttctccgctgatgggagggtttggaatgaagcacccgcctcctcagatcctcatcaaaaacacacctgtacctgcggatcctccaacggccccgaacaaggacaagctgaactctttcatcacccagtattctactggccaagtcagcgtggagatcgagtgggagctgcagaaggaaaacagcaagcgctggaacccggagatccagtacacttccaactattacaagtctaataatgttgaatttgctgttaatactgaaggtgtatatagtgaaccccgccccattggcaccagatacctgactcgtaatctg

SEQ ID NO: 178 - protein, 736 aa, synthetic construct
  REGION 1..736: note = Adeno Associated Virus Capsid Protein Variant
MAADGYLPDWLEDNLSEGIREWWALKPGAPQPKANQQHQDNARGLVLPGYKYLGPGNGLDKGEPVNAADAAALEHDKAYDQQLKAGDNPYLKYNHADAEFQERLKEDTSFGGNLGRAVFQAKKRLLEPLGLVEEAAKTAPGKKRPVEQSPQEPDSSAGIGKSGAQPAKKRLNFGQTGDTESVPDPQPIGEPPAAPSGVGSLTMASGGGAPVADNNEGADGVGSSSGNWHCDSQWLGDRVITTSTRTWALPTYNNHLYKQISNSTSGGSSNDNAYFGYSTPWGYFDFNRFHCHFSPRDWQRLINNNWGFRPKRLNFKLFNIQVKEVTDNNGVKTIANNLTSTVQVFTDSDYQLPYVLGSAHEGCLPPFPADVFMIPQYGYLTLNDGSQAVGRSSFYCLEYFPSQMLRTGNNFQFSYEFENVPFHSSYAHSQSLDRLMNPLIDQYLYYLSKTINGSGQNQQTLKFSVAGPSNMAVQGRNYIPGPSYRQQRVSTTVTQNNNSEFAWPGASSWALNGRNSLMNPGPAMASHKEGEDRFFPLSGSLIFGKQGTGRDNVDADKVMITNEEEIKTTNPVATESYGQVATNHQSAQAQAQTGWVQNQGILPGMVWQDRDVYLQGPIWAKIPHTDGNFHPSPLMGGFGMKHPPPQILIKNTPVPADPPTAPNKDKLNSFITQYSTGQVSVEIEWELQKENSKRWNPEIQYTSNYYKSNNVEFAVNTEGVYSEPRPIGTRYLTRNL

SEQ ID NO: 179 - DNA, 2208 bp, synthetic construct
  misc_feature 1..2208: note = Adeno Associated Virus Capsid Protein Variant
  source 1..2208: mol_type = other DNA
atggctgccgatggttatcttccagattggctcgaggacaaccttagtgaaggaattcgcgagtggtgggctttgaaacctggagcccctcaacccaaggcaaatcaacaacatcaagacaacgctcgaggtcttgtgcttccgggttacaaataccttggacccggcaacggactcgacaagggggagccggtcaacgcagcagacgcggcggccctcgagcacgacaaggcctacgaccagcagctcaaggccggagacaacccgtacctcaagtacaaccacgccgacgccgagttccaggagcggctcaaagaagatacgtcttttgggggcaacctcgggcgagcagtcttccaggccaaaaagaggcttcttgaacctcttggtctggttgaggaagcggctaagacggctcctggaaagaagaggcctgtagagcagtctcctcaggaaccggactcctccgcgggtattggcaaatcgggtgcacagcccgctaaaaagagactcaatttcggtcagactggcgacacagagtcagtcccagaccctcaaccaatcggagaacctcccgcagccccctcaggtgtgggatctcttacaatggcttcaggtggtggcgcaccagtggcagacaataacgaaggtgccgatggagtgggtagttcctcgggaaattggcattgcgattcccaatggctgggggacagagtcatcaccaccagcacccgaacctgggccctgcccacctacaacaatcacctctacaagcaaatctccaacagcacatctggaggatcttcaaatgacaacgcctacttcggctacagcaccccctgggggtattttgacttcaacagattccactgccacttctcaccacgtgactggcagcgactcatcaacaacaactggggattccggcctaagcgactcaacttcaagctcttcaacattcaggtcaaagaggttacggacaacaatggagtcaagaccatcgccaataaccttaccagcacggtccaggtcttcacggactcagactatcagctcccgtacgtgctcgggtcggctcacgagggctgcctcccgccgttcccagcggacgttttcatgattcctcagtacgggtatctgacgcttaatgatggaagccaggccgtgggtcgttcgtccttttactgcctggaatatttcccgtcgcaaatgctaagaacgggtaacaacttccagttcagctacgagtttgagaacgtacctttccatagcagctacgctcacagccaaagcctggaccgactaatgaatccactcatcgaccaatacttgtactatctctcaaagactattaacggttctggaaagaatcaacaaacgctaaaattcagtgtggccggacccagcaacatggctgtccagggaagaaactacatacctggacccagctaccgacaacaacgtgtctcaaccactgtgactcaaaacaacaacagcgaatttgcttggcctggagcttcttcttgggctctcaatggacgtaatagcttgatgaatcctggacctgctatggccagccacaaagaaggagaggaccgtttctttcctttgtctggatctttaatttttggcaaacaaggaactggaagagacaacgtggatgcggacaaagtcatgataaccaacgaagaagaaattaaaactactaacccggtagcaacggagtcctatggacaagtggccacaaaccaccagagtgcccaagcacaggcgcagaccggctgggttcaaaaccaaggaatacttccgggtatggtttggcaggacagagatgtgtacctgcaaggacccatttgggccaaaattcctcacacggacggcaactttcacccttctccgctgatgggagggtttggaatgaagcacccgcctcctcagatcctcatcaaaaacacacctgtacctgcggatcctccaacggccttcaacaaggacaagctgaactctttcatcacccagtattctactggccaagtcagcgtggagatcgagtgggagctgcagaaggaaaacagcaagcgctggaacccggagatccagtacacttccaactattacaagtctaataatgttgaatttgctgttaatactgaaggtgtatatagtgaaccccgccccattggcaccagatacctgactcgtaatctg

SEQ ID NO: 180 - protein, 736 aa, synthetic construct
  REGION 1..736: note = Adeno Associated Virus Capsid Protein Variant
MAADGYLPDWLEDNLSEGIREWWALKPGAPQPKANQQHQDNARGLVLPGYKYLGPGNGLDKGEPVNAADAAALEHDKAYDQQLKAGDNPYLKYNHADAEFQERLKEDTSFGGNLGRAVFQAKKRLLEPLGLVEEAAKTAPGKKRPVEQSPQEPDSSAGIGKSGAQPAKKRLNFGQTGDTESVPDPQPIGEPPAAPSGVGSLTMASGGGAPVADNNEGADGVGSSSGNWHCDSQWLGDRVITTSTRTWALPTYNNHLYKQISNSTSGGSSNDNAYFGYSTPWGYFDFNRFHCHFSPRDWQRLINNNWGFRPKRLNFKLFNIQVKEVTDNNGVKTIANNLTSTVQVFTDSDYQLPYVLGSAHEGCLPPFPADVFMIPQYGYLTLNDGSQAVGRSSFYCLEYFPSQMLRTGNNFQFSYEFENVPFHSSYAHSQSLDRLMNPLIDQYLYYLSKTINGSGKNQQTLKFSVAGPSNMAVQGRNYIPGPSYRQQRVSTTVTQNNNSEFAWPGASSWALNGRNSLMNPGPAMASHKEGEDRFFPLSGSLIFGKQGTGRDNVDADKVMITNEEEIKTTNPVATESYGQVATNHQSAQAQAQTGWVQNQGILPGMVWQDRDVYLQGPIWAKIPHTDGNFHPSPLMGGFGMKHPPPQILIKNTPVPADPPTAFNKDKLNSFITQYSTGQVSVEIEWELQKENSKRWNPEIQYTSNYYKSNNVEFAVNTEGVYSEPRPIGTRYLTRNL

SEQ ID NO: 181 - DNA, 2208 bp, synthetic construct
  misc_feature 1..2208: note = Adeno Associated Virus Capsid Protein Variant
  source 1..2208: mol_type = other DNA
atggctgccgatggttatcttccagattggctcgaggacaaccttagtgaaggaattcgcgagtggtgggctttgaaacctggagcccctcaacccaaggcaaatcaacaacatcaagacaacgctcgaggtcttgtgcttccgggttacaaataccttggacccggcaacggactcgacaagggggagccggtcaacgcagcagacgcggcggccctcgagcacgacaaggcctacgaccagcagctcaaggccggagacaacccgtacctcaagtacaaccacgccgacgccgagttccaggagcggctcaaagaagatacgtcttttgggggcaacctcgggcgagcagtcttccaggccaaaaagaggcttcttgaacctcttggtctggttgaggaagcggctaagacggctcctggaaagaagaggcctgtagagcagtctcctcaggaaccggactcctccgcgggtattggcaaatcgggtgcacagcccgctaaaaagagactcaatttcggtcagactggcgacacagagtcagtcccagaccctcaaccaatcggagaacctcccgcagccccctcaggtgtgggatctcttacaatggcttcaggtggtggcgcaccagtggcagacaataacgaaggtgccgatggagtgggtagttcctcgggaaattggcattgcgattcccaatggctgggggacagagtcatcaccaccagcacccgaacctgggccctgcccacctacaacaatcacctctacaagcaaatctccaacagcacatctggaggatcttcaaatgacaacgcctacttcggctacagcaccccctgggggtattttgacttcaacagattccactgccacttctcaccacgtgactggcagcgactcatcaacaacaactggggattccggcctaagcgactcaacttcaagctcttcaacattcaggtcaaagaggttacggacaacaatggagtcaagaccatcgccaataaccttaccagcacggtccaggtcttcacggactcagactatcagctcccgtacgtgctcgggtcggctcacgagggctgcctcccgccgttcccagcggacgttttcatgattcctcagtacgggtatctgacgcttaatgatggaagccaggccgtgggtcgttcgtccttttactgcctggaatatttcccgtcgcaaatgctaagaacgggtaacaacttccagttcagctacgagtttgagaacgtacctttccatagcagctacgctcacagccaaagcctggaccgactaatgaatccactcatcgaccaatacttgtactatctctcaaagactattaacggttctggacagaatcaacaaacgctaaaattcagtgtggccggacccagcaacatggctgtccagggaagaaactacatacctggacccagctaccgacaacaacgtgtctcaaccactgtgactcaaaacaacaacagctggtttgcttggcctggagcttcttcttgggctctcaatggacgtaatagcttgatgaatcctggacctgctatggccagccacaaagaaggagaggaccgtttctttcctttgtctggatctttaatttttggcaaacaaggaactggaagagacaacgtggatgcggacaaagtcatgataaccaacgaagaagaaattaaaactactaacccggtagcaacggagtcctatggacaagtggccacaaaccaccagagtgcccaagcacaggcgcagaccggctgggttcaaaaccaaggaatacttccgggtatggtttggcaggacagagatgtgtacctgcaaggacccatttgggccaaaattcctcacacggacggcaactttcacccttctccgctgatgggagggtttggaatgaagcacccgcctcctcagatcctcatcaaaaacacacctgtacctgcggatcctccaacggccttcaacaaggacaagctgaactctttcatcacccagtattctactggccaagtcagcgtggagatcgagtgggagctgcagaaggaaaacagcaagcgctggaacccggagatccagtacacttccaactattacaagtctaataatgttgaatttgctgttaatactgaaggtgtatatagtgaaccccgccccattggcaccagatacctgactcgtaatctg

SEQ ID NO: 182 - protein, 736 aa, synthetic construct
  REGION 1..736: note = Adeno Associated Virus Capsid Protein Variant
MAADGYLPDWLEDNLSEGIREWWALKPGAPQPKANQQHQDNARGLVLPGYKYLGPGNGLDKGEPVNAADAAALEHDKAYDQQLKAGDNPYLKYNHADAEFQERLKEDTSFGGNLGRAVFQAKKRLLEPLGLVEEAAKTAPGKKRPVEQSPQEPDSSAGIGKSGAQPAKKRLNFGQTGDTESVPDPQPIGEPPAAPSGVGSLTMASGGGAPVADNNEGADGVGSSSGNWHCDSQWLGDRVITTSTRTWALPTYNNHLYKQISNSTSGGSSNDNAYFGYSTPWGYFDFNRFHCHFSPRDWQRLINNNWGFRPKRLNFKLFNIQVKEVTDNNGVKTIANNLTSTVQVFTDSDYQLPYVLGSAHEGCLPPFPADVFMIPQYGYLTLNDGSQAVGRSSFYCLEYFPSQMLRTGNNFQFSYEFENVPFHSSYAHSQSLDRLMNPLIDQYLYYLSKTINGSGQNQQTLKFSVAGPSNMAVQGRNYIPGPSYRQQRVSTTVTQNNNSWFAWPGASSWALNGRNSLMNPGPAMASHKEGEDRFFPLSGSLIFGKQGTGRDNVDADKVMITNEEEIKTTNPVATESYGQVATNHQSAQAQAQTGWVQNQGILPGMVWQDRDVYLQGPIWAKIPHTDGNFHPSPLMGGFGMKHPPPQILIKNTPVPADPPTAFNKDKLNSFITQYSTGQVSVEIEWELQKENSKRWNPEIQYTSNYYKSNNVEFAVNTEGVYSEPRPIGTRYLTRNL

SEQ ID NO: 183 - DNA, 2208 bp, synthetic construct
  misc_feature 1..2208: note = Adeno Associated Virus Capsid Protein Variant
  source 1..2208: mol_type = other DNA
atggctgccgatggttatcttccagattggctcgaggacaaccttagtgaaggaattcgcgagtggtgggctttgaaacctggagcccctcaacccaaggcaaatcaacaacatcaagacaacgctcgaggtcttgtgcttccgggttacaaataccttggacccggcaacggactcgacaagggggagccggtcaacgcagcagacgcggcggccctcgagcacgacaaggcctacgaccagcagctcaaggccggagacaacccgtacctcaagtacaaccacgccgacgccgagttccaggagcggctcaaagaagatacgtcttttgggggcaacctcgggcgagcagtcttccaggccaaaaagaggcttcttgaacctcttggtctggttgaggaagcggctaagacggctcctggaaagaagaggcctgtagagcagtctcctcaggaaccggactcctccgcgggtattggcaaatcgggtgcacagcccgctaaaaagagactcaatttcggtcagactggcgacacagagtcagtcccagaccctcaaccaatcggagaacctcccgcagccccctcaggtgtgggatctcttacaatggcttcaggtggtggcgcaccagtggcagacaataacgaaggtgccgatggagtgggtagttcctcgggaaattggcattgcgattcccaatggctgggggacagagtcatcaccaccagcacccgaacctgggccctgcccacctacaacaatcacctctacaagcaaatctccaacagcacatctggaggatcttcaaatgacaacgcctacttcggctacagcaccccctgggggtattttgacttcaacagattccactgccacttctcaccacgtgactggcagcgactcatcaacaacaactggggattccggcctaagcgactcaacttcaagctcttcaacattcaggtcaaagaggttacggacaacaatggagtcaagaccatcgccaataaccttaccagcacggtccaggtcttcacggactcagactatcagctcccgtacgtgctcgggtcggctcacgagggctgcctcccgccgttcccagcggacgttttcatgattcctcagtacgggtatctgacgcttaatgatggaagccaggccgtgggtcgttcgtccttttactgcctggaatatttcccgtcgcaaatgctaagaacgggtaacaacttccagttcagctacgagtttgagaacgtacctttccatagcagctacgctcacagccaaagcctggaccgactaatgaatccactcatcgaccaatacttgtactatctctcaaagactattaacggttctggacagaatcaacaaacgctaaaattcagtgtggccggacccagcaacatggctgtccagggaagaaactacatacctggacccagctaccgacaacaacgtgtctcaaccactgtgactcaaaacaacaacagcgaatttgcttggcctggagcttcttcttgggctctcaatggacgtaatagcttgatgaatcctggacctgctatggccagccacaaagaaggagaggaccgtttctttcctttgtctggatctttaatttttggcaaacaagatactggaagagacaacgtggatgcggacaaagtcatgataaccaacgaagaagaaattaaaactactaacccggtagcaacggagtcctatggacaagtggccacaaaccaccagagtgcccaagcacaggcgcagaccggctgggttcaaaaccaaggaatacttccgggtatggtttggcaggacagagatgtgtacctgcaaggacccatttgggccaaaattcctcacacggacggcaactttcacccttctccgctgatgggagggtttggaatgaagcacccgcctcctcagatcctcatcaaaaacacacctgtacctgcggatcctccaacggccttcaacaaggacaagctgaactctttcatcacccagtattctactggccaagtcagcgtggagatcgagtgggagctgcagaaggaaaacagcaagcgctggaacccggagatccagtacacttccaactattacaagtctaataatgttgaatttgctgttaatactgaaggtgtatatagtgaaccccgccccattggcaccagatacctgactcgtaatctg

SEQ ID NO: 184 - protein, 736 aa, synthetic construct
  REGION 1..736: note = Adeno Associated Virus Capsid Protein Variant
MAADGYLPDWLEDNLSEGIREWWALKPGAPQPKANQQHQDNARGLVLPGYKYLGPGNGLDKGEPVNAADAAALEHDKAYDQQLKAGDNPYLKYNHADAEFQERLKEDTSFGGNLGRAVFQAKKRLLEPLGLVEEAAKTAPGKKRPVEQSPQEPDSSAGIGKSGAQPAKKRLNFGQTGDTESVPDPQPIGEPPAAPSGVGSLTMASGGGAPVADNNEGADGVGSSSGNWHCDSQWLGDRVITTSTRTWALPTYNNHLYKQISNSTSGGSSNDNAYFGYSTPWGYFDFNRFHCHFSPRDWQRLINNNWGFRPKRLNFKLFNIQVKEVTDNNGVKTIANNLTSTVQVFTDSDYQLPYVLGSAHEGCLPPFPADVFMIPQYGYLTLNDGSQAVGRSSFYCLEYFPSQMLRTGNNFQFSYEFENVPFHSSYAHSQSLDRLMNPLIDQYLYYLSKTINGSGQNQQTLKFSVAGPSNMAVQGRNYIPGPSYRQQRVSTTVTQNNNSEFAWPGASSWALNGRNSLMNPGPAMASHKEGEDRFFPLSGSLIFGKQDTGRDNVDADKVMITNEEEIKTTNPVATESYGQVATNHQSAQAQAQTGWVQNQGILPGMVWQDRDVYLQGPIWAKIPHTDGNFHPSPLMGGFGMKHPPPQILIKNTPVPADPPTAFNKDKLNSFITQYSTGQVSVEIEWELQKENSKRWNPEIQYTSNYYKSNNVEFAVNTEGVYSEPRPIGTRYLTRNL

SEQ ID NO: 185 - DNA, 2208 bp, synthetic construct
  misc_feature 1..2208: note = Adeno Associated Virus Capsid Protein Variant
  source 1..2208: mol_type = other DNA
atggctgccgatggttatcttccagattggctcgaggacaaccttagtgaaggaattcgcgagtggtgggctttgaaacctggagcccctcaacccaaggcaaatcaacaacatcaagacaacgctcgaggtcttgtgcttccgggttacaaataccttggacccggcaacggactcgacaagggggagccggtcaacgcagcagacgcggcggccctcgagcacgacaaggcctacgaccagcagctcaaggccggagacaacccgtacctcaagtacaaccacgccgacgccgagttccaggagcggctcaaagaagatacgtcttttgggggcaacctcgggcgagcagtcttccaggccaaaaagaggcttcttgaacctcttggtctggttgaggaagcggctaagacggctcctggaaagaagaggcctgtagagcagtctcctcaggaaccggactcctccgcgggtattggcaaatcgggtgcacagcccgctaaaaagagactcaatttcggtcagactggcgacacagagtcagtcccagaccctcaaccaatcggagaacctcccgcagccccctcaggtgtgggatctcttacaatggcttcaggtggtggcgcaccagtggcagacaataacgaaggtgccgatggagtgggtagttcctcgggaaattggcattgcgattcccaatggctgggggacagagtcatcaccaccagcacccgaacctgggccctgcccacctacaacaatcacctctacaagcaaatctccaacagcacatctggaggatcttcaaatgacaacgcctacttcggctacagcaccccctgggggtattttgacttcaacagattccactgccacttctcaccacgtgactggcagcgactcatcaacaacaactggggattccggcctaagcgactcaacttcaagctcttcaacattcaggtcaaagaggttacggacaacaatggagtcaagaccatcgccaataaccttaccagcacggtccaggtcttcacggactcagactatcagctcccgtacgtgctcgggtcggctcacgagggctgcctcccgccgttcccagcggacgttttcatgattcctcagtacgggtatctgacgcttaatgatggaagccaggccgtgggtcgttcgtccttttactgcctggaatatttcccgtcgcaaatgctaagaacgggtaacaacttccagttcagctacgagtttgagaacgtacctttccatagcagctacgctcacagccaaagcctggaccgactaatgaatccactcatcgaccaatacttgtactatctctcaaagactattaacggttctggacagaatcaacaaacgctaaaattcagtgtggccggacccagcaacatggctgtccagggaagaaactacatacctggacccagctaccgacaacaacgtgtctcaaccactgtgactcaaaacaacaacagcgaatttgcttggcctggagcttcttcttgggctctcaatggacgtaatagcttgatgaatcctggacctgctatggccagccacaaagaaggagaggaccgtttctttcctttgtctggatctttaatttttggcaaacaaggaactggaagagacaacgtggatgcgcggaaagtcatgataaccaacgaagaagaaattaaaactactaacccggtagcaacggagtcctatggacaagtggccacaaaccaccagagtgcccaagcacaggcgcagaccggctgggttcaaaaccaaggaatacttccgggtatggtttggcaggacagagatgtgtacctgcaaggacccatttgggccaaaattcctcacacggacggcaactttcacccttctccgctgatgggagggtttggaatgaagcacccgcctcctcagatcctcatcaaaaacacacctgtacctgcggatcctccaacggccttcaacaaggacaagctgaactctttcatcacccagtattctactggccaagtcagcgtggagatcgagtgggagctgcagaaggaaaacagcaagcgctggaacccggagatccagtacacttccaactattacaagtctaataatgttgaatttgctgttaatactgaaggtgtatatagtgaaccccgccccattggcaccagatacctgactcgtaatctg

SEQ ID NO: 186 - protein, 736 aa, synthetic construct
  REGION 1..736: note = Adeno Associated Virus Capsid Protein Variant
MAADGYLPDWLEDNLSEGIREWWALKPGAPQPKANQQHQDNARGLVLPGYKYLGPGNGLDKGEPVNAADAAALEHDKAYDQQLKAGDNPYLKYNHADAEFQERLKEDTSFGGNLGRAVFQAKKRLLEPLGLVEEAAKTAPGKKRPVEQSPQEPDSSAGIGKSGAQPAKKRLNFGQTGDTESVPDPQPIGEPPAAPSGVGSLTMASGGGAPVADNNEGADGVGSSSGNWHCDSQWLGDRVITTSTRTWALPTYNNHLYKQISNSTSGGSSNDNAYFGYSTPWGYFDFNRFHCHFSPRDWQRLINNNWGFRPKRLNFKLFNIQVKEVTDNNGVKTIANNLTSTVQVFTDSDYQLPYVLGSAHEGCLPPFPADVFMIPQYGYLTLNDGSQAVGRSSFYCLEYFPSQMLRTGNNFQFSYEFENVPFHSSYAHSQSLDRLMNPLIDQYLYYLSKTINGSGQNQQTLKFSVAGPSNMAVQGRNYIPGPSYRQQRVSTTVTQNNNSEFAWPGASSWALNGRNSLMNPGPAMASHKEGEDRFFPLSGSLIFGKQGTGRDNVDARKVMITNEEEIKTTNPVATESYGQVATNHQSAQAQAQTGWVQNQGILPGMVWQDRDVYLQGPIWAKIPHTDGNFHPSPLMGGFGMKHPPPQILIKNTPVPADPPTAFNKDKLNSFITQYSTGQVSVEIEWELQKENSKRWNPEIQYTSNYYKSNNVEFAVNTEGVYSEPRPIGTRYLTRNL

SEQ ID NO: 187 - DNA, 2208 bp, synthetic construct
  misc_feature 1..2208: note = Adeno Associated Virus Capsid Protein Variant
  source 1..2208: mol_type = other DNA
atggctgccgatggttatcttccagattggctcgaggacaaccttagtgaaggaattcgcgagtggtgggctttgaaacctggagcccctcaacccaaggcaaatcaacaacatcaagacaacgctcgaggtcttgtgcttccgggttacaaataccttggacccggcaacggactcgacaagggggagccggtcaacgcagcagacgcggcggccctcgagcacgacaaggcctacgaccagcagctcaaggccggagacaacccgtacctcaagtacaaccacgccgacgccgagttccaggagcggctcaaagaagatacgtcttttgggggcaacctcgggcgagcagtcttccaggccaaaaagaggcttcttgaacctcttggtctggttgaggaagcggctaagacggctcctggaaagaagaggcctgtagagcagtctcctcaggaaccggactcctccgcgggtattggcaaatcgggtgcacagcccgctaaaaagagactcaatttcggtcagactggcgacacagagtcagtcccagaccctcaaccaatcggagaacctcccgcagccccctcaggtgtgggatctcttacaatggcttcaggtggtggcgcaccagtggcagacaataacgaaggtgccgatggagtgggtagttcctcgggaaattggcattgcgattcccaatggctgggggacagagtcatcaccaccagcacccgaacctgggccctgcccacctacaacaatcacctctacaagcaaatctccaacagcacatctggaggatcttcaaatgacaacgcctacttcggctacagcaccccctgggggtattttgacttcaacagattccactgccacttctcaccacgtgactggcagcgactcatcaacaacaactggggattccggcctaagcgactcaacttcaagctcttcaacattcaggtcaaagaggttacggacaacaatggagtcaagaccatcgccaataaccttaccagcacggtccaggtcttcacggactcagactatcagctcccgtacgtgctcgggtcggctcacgagggctgcctcccgccgttcccagcggacgttttcatgattcctcagtacgggtatctgacgcttaatgatggaagccaggccgtgggtcgttcgtccttttactgcctggaatatttcccgtcgcaaatgctaagaacgggtaacaacttccagttcagctacgagtttgagaacgtacctttccatagcagctacgctcacagccaaagcctggaccgactaatgaatccactcatcgaccaatacttgtactatctctcaaagactattaacggttctggaccgaatcaacaaacgctaaaattcagtgtggccggacccagcaacatggctgtccagggaagaaactacatacctggacccagctaccgacaacaacgtgtctcaaccactgtgactcaaaacaacaacagcgaatttgcttggcctggagcttcttcttgggctctcaatggacgtaatagcttgatgaatcctggacctgctatggccagccacaaagaaggagaggaccgtttctttcctttgtctggatctttaatttttggcaaacaaggaactggaagagacaacgtggatgcggacaaagtcatgataaccaacgaagaagaaattaaaactactaacccggtagcaacggagtcctatggacaagtggccacaaaccaccagagtgcccaagcacaggcgcagaccggctgggttcaaaaccaaggaatacttccgggtatggtttggcaggacagagatgtgtacctgcaaggacccatttgggccaaaattcctcacacggacggcaactttcacccttctccgctgatgggagggtttggaatgaagcacccgcctcctcagatcctcatcaaaaacacacctgtacctgcggatcctccaacggccttcaacaaggacaagctgaactctttcatcacccagtattctactggccaagtcagcgtggagatcgagtgggagctgcagaaggaaaacagcaagcgctggaacccggagatccagtacacttccaactattacaagtctaataatgttgaatttgctgttaatactgaaggtgtatatagtgaaccccgccccattggcaccagatacctgactcgtaatctg

SEQ ID NO: 188 - protein, 736 aa, synthetic construct
  REGION 1..736: note = Adeno Associated Virus Capsid Protein Variant
MAADGYLPDWLEDNLSEGIREWWALKPGAPQPKANQQHQDNARGLVLPGYKYLGPGNGLDKGEPVNAADAAALEHDKAYDQQLKAGDNPYLKYNHADAEFQERLKEDTSFGGNLGRAVFQAKKRLLEPLGLVEEAAKTAPGKKRPVEQSPQEPDSSAGIGKSGAQPAKKRLNFGQTGDTESVPDPQPIGEPPAAPSGVGSLTMASGGGAPVADNNEGADGVGSSSGNWHCDSQWLGDRVITTSTRTWALPTYNNHLYKQISNSTSGGSSNDNAYFGYSTPWGYFDFNRFHCHFSPRDWQRLINNNWGFRPKRLNFKLFNIQVKEVTDNNGVKTIANNLTSTVQVFTDSDYQLPYVLGSAHEGCLPPFPADVFMIPQYGYLTLNDGSQAVGRSSFYCLEYFPSQMLRTGNNFQFSYEFENVPFHSSYAHSQSLDRLMNPLIDQYLYYLSKTINGSGPNQQTLKFSVAGPSNMAVQGRNYIPGPSYRQQRVSTTVTQNNNSEFAWPGASSWALNGRNSLMNPGPAMASHKEGEDRFFPLSGSLIFGKQGTGRDNVDADKVMITNEEEIKTTNPVATESYGQVATNHQSAQAQAQTGWVQNQGILPGMVWQDRDVYLQGPIWAKIPHTDGNFHPSPLMGGFGMKHPPPQILIKNTPVPADPPTAFNKDKLNSFITQYSTGQVSVEIEWELQKENSKRWNPEIQYTSNYYKSNNVEFAVNTEGVYSEPRPIGTRYLTRNL

SEQ ID NO: 189 - DNA, 2208 bp, synthetic construct
  misc_feature 1..2208: note = Adeno Associated Virus Capsid Protein Variant
  source 1..2208: mol_type = other DNA
atggctgccgatggttatcttccagattggctcgaggacaaccttagtgaaggaattcgcgagtggtgggctttgaaacctggagcccctcaacccaaggcaaatcaacaacatcaagacaacgctcgaggtcttgtgcttccgggttacaaataccttggacccggcaacggactcgacaagggggagccggtcaacgcagcagacgcggcggccctcgagcacgacaaggcctacgaccagcagctcaaggccggagacaacccgtacctcaagtacaaccacgccgacgccgagttccaggagcggctcaaagaagatacgtcttttgggggcaacctcgggcgagcagtcttccaggccaaaaagaggcttcttgaacctcttggtctggttgaggaagcggctaagacggctcctggaaagaagaggcctgtagagcagtctcctcaggaaccggactcctccgcgggtattggcaaatcgggtgcacagcccgctaaaaagagactcaatttcggtcagactggcgacacagagtcagtcccagaccctcaaccaatcggagaacctcccgcagccccctcaggtgtgggatctcttacaatggcttcaggtggtggcgcaccagtggcagacaataacgaaggtgccgatggagtgggtagttcctcgggaaattggcattgcgattcccaatggctgggggacagagtcatcaccaccagcacccgaacctgggccctgcccacctacaacaatcacctctacaagcaaatctccaacagcacatctggaggatcttcaaatgacaacgcctacttcggctacagcaccccctgggggtattttgacttcaacagattccactgccacttctcaccacgtgactggcagcgactcatcaacaacaactggggattccggcctaagcgactcaacttcaagctcttcaacattcaggtcaaagaggttacggacaacaatggagtcaagaccatcgccaataaccttaccagcacggtccaggtcttcacggactcagactatcagctcccgtacgtgctcgggtcggctcacgagggctgcctcccgccgttcccagcggacgttttcatgattcctcagtacgggtatctgacgcttaatgatggaagccaggccgtgggtcgttcgtccttttactgcctggaatatttcccgtcgcaaatgctaagaacgggtaacaacttccagttcagctacgagtttgagaacgtacctttccatagcagctacgctcacagccaaagcctggaccgactaatgaatccactcatcgaccaatacttgtactatctctcaaagactattaacggttctggacagaatcaacaaacgctaaaattcagtgtggccggacccagcaacatggctgtccagggaagaaactacatacctggacccagctaccgacaacaacgtgtctcaaccactgtgactcaaaacaacaacagcgaatttgcttggcctggagcttcttcttgggctctcaatggacgtaatagcttgatgaatcctggacctgctatggccagccacaaagaaggagaggaccgtttctttcctttgtctggatctttaatttttggcaaacaaggaactggaagagacaacgtggatgcggacaaagtcatgataaccaacgaagaagaaattaaaactactaacccggtagcaacggagtcctatggacaagtggccacaaaccaccagagtgccccggcacaggcgcagaccggctgggttcaaaaccaaggaatacttccgggtatggtttggcaggacagagatgtgtacctgcaaggacccatttgggccaaaattcctcacacggacggcaactttcacccttctccgctgatgggagggtttggaatgaagcacccgcctcctcagatcctcatcaaaaacacacctgtacctgcggatcctccaacggccttcaacaaggacaagctgaactctttcatcacccagtattctactggccaagtcagcgtggagatcgagtgggagctgcagaaggaaaacagcaagcgctggaacccggagatccagtacacttccaactattacaagtctaataatgttgaatttgctgttaatactgaaggtgtatatagtgaaccccgccccattggcaccagatacctgactcgtaatctg

SEQ ID NO: 190 - protein, 736 aa, synthetic construct
  REGION 1..736: note = Adeno Associated Virus Capsid Protein Variant
MAADGYLPDWLEDNLSEGIREWWALKPGAPQPKANQQHQDNARGLVLPGYKYLGPGNGLDKGEPVNAADAAALEHDKAYDQQLKAGDNPYLKYNHADAEFQERLKEDTSFGGNLGRAVFQAKKRLLEPLGLVEEAAKTAPGKKRPVEQSPQEPDSSAGIGKSGAQPAKKRLNFGQTGDTESVPDPQPIGEPPAAPSGVGSLTMASGGGAPVADNNEGADGVGSSSGNWHCDSQWLGDRVITTSTRTWALPTYNNHLYKQISNSTSGGSSNDNAYFGYSTPWGYFDFNRFHCHFSPRDWQRLINNNWGFRPKRLNFKLFNIQVKEVTDNNGVKTIANNLTSTVQVFTDSDYQLPYVLGSAHEGCLPPFPADVFMIPQYGYLTLNDGSQAVGRSSFYCLEYFPSQMLRTGNNFQFSYEFENVPFHSSYAHSQSLDRLMNPLIDQYLYYLSKTINGSGQNQQTLKFSVAGPSNMAVQGRNYIPGPSYRQQRVSTTVTQNNNSEFAWPGASSWALNGRNSLMNPGPAMASHKEGEDRFFPLSGSLIFGKQGTGRDNVDADKVMITNEEEIKTTNPVATESYGQVATNHQSAPAQAQTGWVQNQGILPGMVWQDRDVYLQGPIWAKIPHTDGNFHPSPLMGGFGMKHPPPQILIKNTPVPADPPTAFNKDKLNSFITQYSTGQVSVEIEWELQKENSKRWNPEIQYTSNYYKSNNVEFAVNTEGVYSEPRPIGTRYLTRNL

SEQ ID NO: 191 - DNA, 2208 bp, synthetic construct
  misc_feature 1..2208: note = Adeno Associated Virus Capsid Protein Variant
  source 1..2208: mol_type = other DNA
atggctgccgatggttatcttccagattggctcgaggacaaccttagtgaaggaattcgcgagtggtgggctttgaaacctggagcccctcaacccaaggcaaatcaacaacatcaagacaacgctcgaggtcttgtgcttccgggttacaaataccttggacccggcaacggactcgacaagggggagccggtcaacgcagcagacgcggcggccctcgagcacgacaaggcctacgaccagcagctcaaggccggagacaacccgtacctcaagtacaaccacgccgacgccgagttccaggagcggctcaaagaagatacgtcttttgggggcaacctcgggcgagcagtcttccaggccaaaaagaggcttcttgaacctcttggtctggttgaggaagcggctaagacggctcctggaaagaagaggcctgtagagcagtctcctcaggaaccggactcctccgcgggtattggcaaatcgggtgcacagcccgctaaaaagagactcaatttcggtcagactggcgacacagagtcagtcccagaccctcaaccaatcggagaacctcccgcagccccctcaggtgtgggatctcttacaatggcttcaggtggtggcgcaccagtggcagacaataacgaaggtgccgatggagtgggtagttcctcgggaaattggcattgcgattcccaatggctgggggacagagtcatcaccaccagcacccgaacctgggccctgcccacctacaacaatcacctctacaagcaaatctccaacagcacatctggaggatcttcaaatgacaacgcctacttcggctacagcaccccctgggggtattttgacttcaacagattccactgccacttctcaccacgtgactggcagcgactcatcaacaacaactggggattccggcctaagcgactcaacttcaagctcttcaacattcaggtcaaagaggttacggacaacaatggagtcaagaccatcgccaataaccttaccagcacggtccaggtcttcacggactcagactatcagctcccgtacgtgctcgggtcggctcacgagggctgcctcccgccgttcccagcggacgttttcatgattcctcagtacgggtatctgacgcttaatgatggaagccaggccgtgggtcgttcgtccttttactgcctggaatatttcccgtcgcaaatgctaagaacgggtaacaacttccagttcagctacgagtttgagaacgtacctttccatagcagctacgctcacagccaaagcctggaccgactaatgaatccactcatcgaccaatacttgtactatctctcaaagactattaacggttctggacagaatcaacaaacgctaaaattcagtgtggccggacccagcaacatggctgtccagggaagaaactacatacctggacccagctaccgacaacaacgtgtctcaaccactgtgactcaaaacaacaacagcgaatttgcttggcctggagcttcttcttgggctctcaatggacgtaatagcttgatgaatcctggacctgctatggccagccacaaagaaggagaggaccgtttctttcctttgtctggatctttaatttttggcaaacaaggaactggaagagacaacgtggatgcggacaaagtcatgataaccaacgaagaagaaattaaaactactaacccggtagcaacggagtcctatggacaagtggccacaaaccaccagagtgcccaagcacaggcgcagaccggctgggttcaaaaccaaggaatacttccgggtatggtttggcaggacagagatgtgtacctgcaaggacccatttgggccaaaattcctcacacggacggcaactttcacccttctccgctgatgggagggtttggaatgaagcacccgcctcctcagatcctcatcaaaaacacacctgtacctgcggatcctcgtacggccttcaacaaggacaagctgaactctttcatcacccagtattctactggccaagtcagcgtggagatcgagtgggagctgcagaaggaaaacagcaagcgctggaacccggagatccagtacacttccaactattacaagtctaataatgttgaatttgctgttaatactgaaggtgtatatagtgaaccccgccccattggcaccagatacctgactcgtaatctg

SEQ ID NO: 192 - protein, 736 aa, synthetic construct
  REGION 1..736: note = Adeno Associated Virus Capsid Protein Variant
MAADGYLPDWLEDNLSEGIREWWALKPGAPQPKANQQHQDNARGLVLPGYKYLGPGNGLDKGEPVNAADAAALEHDKAYDQQLKAGDNPYLKYNHADAEFQERLKEDTSFGGNLGRAVFQAKKRLLEPLGLVEEAAKTAPGKKRPVEQSPQEPDSSAGIGKSGAQPAKKRLNFGQTGDTESVPDPQPIGEPPAAPSGVGSLTMASGGGAPVADNNEGADGVGSSSGNWHCDSQWLGDRVITTSTRTWALPTYNNHLYKQISNSTSGGSSNDNAYFGYSTPWGYFDFNRFHCHFSPRDWQRLINNNWGFRPKRLNFKLFNIQVKEVTDNNGVKTIANNLTSTVQVFTDSDYQLPYVLGSAHEGCLPPFPADVFMIPQYGYLTLNDGSQAVGRSSFYCLEYFPSQMLRTGNNFQFSYEFENVPFHSSYAHSQSLDRLMNPLIDQYLYYLSKTINGSGQNQQTLKFSVAGPSNMAVQGRNYIPGPSYRQQRVSTTVTQNNNSEFAWPGASSWALNGRNSLMNPGPAMASHKEGEDRFFPLSGSLIFGKQGTGRDNVDADKVMITNEEEIKTTNPVATESYGQVATNHQSAQAQAQTGWVQNQGILPGMVWQDRDVYLQGPIWAKIPHTDGNFHPSPLMGGFGMKHPPPQILIKNTPVPADPRTAFNKDKLNSFITQYSTGQVSVEIEWELQKENSKRWNPEIQYTSNYYKSNNVEFAVNTEGVYSEPRPIGTRYLTRNL

SEQ ID NO: 193 - DNA, 2208 bp, synthetic construct
  misc_feature 1..2208: note = Adeno Associated Virus Capsid Protein Variant
  source 1..2208: mol_type = other DNA
atggctgccgatggttatcttccagattggctcgaggacaaccttagtgaaggaattcgcgagtggtgggctttgaaacctggagcccctcaacccaaggcaaatcaacaacatcaagacaacgctcgaggtcttgtgcttccgggttacaaataccttggacccggcaacggactcgacaagggggagccggtcaacgcagcagacgcggcggccctcgagcacgacaaggcctacgaccagcagctcaaggccggagacaacccgtacctcaagtacaaccacgccgacgccgagttccaggagcggctcaaagaagatacgtcttttgggggcaacctcgggcgagcagtcttccaggccaaaaagaggcttcttgaacctcttggtctggttgaggaagcggctaagacggctcctggaaagaagaggcctgtagagcagtctcctcaggaaccggactcctccgcgggtattggcaaatcgggtgcacagcccgctaaaaagagactcaatttcggtcagactggcgacacagagtcagtcccagaccctcaaccaatcggagaacctcccgcagccccctcaggtgtgggatctcttacaatggcttcaggtggtggcgcaccagtggcagacaataacgaaggtgccgatggagtgggtagttcctcgggaaattggcattgcgattcccaatggctgggggacagagtcatcaccaccagcacccgaacctgggccctgcccacctacaacaatcacctctacaagcaaatctccaacagcacatctggaggatcttcaaatgacaacgcctacttcggctacagcaccccctgggggtattttgacttcaacagattccactgccacttctcaccacgtgactggcagcgactcatcaacaacaactggggattccggcctaagcgactcaacttcaagctcttcaacattcaggtcaaagaggttacggacaacaatggagtcaagaccatcgccaataaccttaccagcacggtccaggtcttcacggactcagactatcagctcccgtacgtgctcgggtcggctcacgagggctgcctcccgccgttcccagcggacgttttcatgattcctcagtacgggtatctgacgcttaatgatggaagccaggccgtgggtcgttcgtccttttactgcctggaatatttcccgtcgcaaatgctaagaacgggtaacaacttccagttcagctacgagtttgagaacgtacctttccatagcagctacgctcacagccaaagcctggaccgactaatgaatccactcatcgaccaatacttgtactatctctcaaagactattaacggttctggatttaatcaacaaacgctaaaattcagtgtggccggacccagcaacatggctgtccagggaagaaactacatacctggacccagctaccgacaacaacgtgtctcaaccactgtgactcaaaacaacaacagcgaatttgcttggcctggagcttcttcttgggctctcaatggacgtaatagcttgatgaatcctggacctgctatggccagccacaaagaaggagaggaccgtttctttcctttgtctggatctttaatttttggcaaacaaggaactggaagagacaacgtggatgcggacaaagtcatgataaccaacgaagaagaaattaaaactactaacccggtagcaacggagtcctatggacaagtggccacaaaccaccagagtgcccaagcacaggcgcagaccggctgggttcaaaaccaaggaatacttccgggtatggtttggcaggacagagatgtgtacctgcaaggacccatttgggccaaaattcctcacacggacggcaactttcacccttctccgctgatgggagggtttggaatgaagcacccgcctcctcagatcctcatcaaaaacacacctgtacctgcggatcctccaacggccttcaacaaggacaagctgaactctttcatcacccagtattctactggccaagtcagcgtggagatcgagtgggagctgcagaaggaaaacagcaagcgctggaacccggagatccagtacacttccaactattacaagtctaataatgttgaatttgctgttaatactgaaggtgtatatagtgaaccccgccccattggcaccagatacctgactcgtaatctg

SEQ ID NO: 194 - protein, 736 aa, synthetic construct
  REGION 1..736: note = Adeno Associated Virus Capsid Protein Variant
MAADGYLPDWLEDNLSEGIREWWALKPGAPQPKANQQHQDNARGLVLPGYKYLGPGNGLDKGEPVNAADAAALEHDKAYDQQLKAGDNPYLKYNHADAEFQERLKEDTSFGGNLGRAVFQAKKRLLEPLGLVEEAAKTAPGKKRPVEQSPQEPDSSAGIGKSGAQPAKKRLNFGQTGDTESVPDPQPIGEPPAAPSGVGSLTMASGGGAPVADNNEGADGVGSSSGNWHCDSQWLGDRVITTSTRTWALPTYNNHLYKQISNSTSGGSSNDNAYFGYSTPWGYFDFNRFHCHFSPRDWQRLINNNWGFRPKRLNFKLFNIQVKEVTDNNGVKTIANNLTSTVQVFTDSDYQLPYVLGSAHEGCLPPFPADVFMIPQYGYLTLNDGSQAVGRSSFYCLEYFPSQMLRTGNNFQFSYEFENVPFHSSYAHSQSLDRLMNPLIDQYLYYLSKTINGSGFNQQTLKFSVAGPSNMAVQGRNYIPGPSYRQQRVSTTVTQNNNSEFAWPGASSWALNGRNSLMNPGPAMASHKEGEDRFFPLSGSLIFGKQGTGRDNVDADKVMITNEEEIKTTNPVATESYGQVATNHQSAQAQAQTGWVQNQGILPGMVWQDRDVYLQGPIWAKIPHTDGNFHPSPLMGGFGMKHPPPQILIKNTPVPADPPTAFNKDKLNSFITQYSTGQVSVEIEWELQKENSKRWNPEIQYTSNYYKSNNVEFAVNTEGVYSEPRPIGTRYLTRNL

SEQ ID NO: 195 - DNA, 2208 bp, synthetic construct
  misc_feature 1..2208: note = Adeno Associated Virus Capsid Protein Variant
  source 1..2208: mol_type = other DNA
atggctgccgatggttatcttccagattggctcgaggacaaccttagtgaaggaattcgcgagtggtgggctttgaaacctggagcccctcaacccaaggcaaatcaacaacatcaagacaacgctcgaggtcttgtgcttccgggttacaaataccttggacccggcaacggactcgacaagggggagccggtcaacgcagcagacgcggcggccctcgagcacgacaaggcctacgaccagcagctcaaggccggagacaacccgtacctcaagtacaaccacgccgacgccgagttccaggagcggctcaaagaagatacgtcttttgggggcaacctcgggcgagcagtcttccaggccaaaaagaggcttcttgaacctcttggtctggttgaggaagcggctaagacggctcctggaaagaagaggcctgtagagcagtctcctcaggaaccggactcctccgcgggtattggcaaatcgggtgcacagcccgctaaaaagagactcaatttcggtcagactggcgacacagagtcagtcccagaccctcaaccaatcggagaacctcccgcagccccctcaggtgtgggatctcttacaatggcttcaggtggtggcgcaccagtggcagacaataacgaaggtgccgatggagtgggtagttcctcgggaaattggcattgcgattcccaatggctgggggacagagtcatcaccaccagcacccgaacctgggccctgcccacctacaacaatcacctctacaagcaaatctccaacagcacatctggaggatcttcaaatgacaacgcctacttcggctacagcaccccctgggggtattttgacttcaacagattccactgccacttctcaccacgtgactggcagcgactcatcaacaacaactggggattccggcctaagcgactcaacttcaagctcttcaacattcaggtcaaagaggttacggacaacaatggagtcaagaccatcgccaataaccttaccagcacggtccaggtcttcacggactcagactatcagctcccgtacgtgctcgggtcggctcacgagggctgcctcccgccgttcccagcggacgttttcatgattcctcagtacgggtatctgacgcttaatgatggaagccaggccgtgggtcgttcgtccttttactgcctggaatatttcccgtcgcaaatgctaagaacgggtaacaacttccagttcagctacgagtttgagaacgtacctttccatagcagctacgctcacagccaaagcctggaccgactaatgaatccactcatcgaccaatacttgtactatctctcaaagactattaacggttctggacagaatcaacaaacgctaaaattcagtgtggccggacccagcaacatggctgtccagggaagaaactacatacctggacccagctaccgacaacaacgtgtctcaaccactgtgactcaaaacaacaacagcgaatttgcttggcctggagcttcttcttgggctctcaatggacgtaatagcttgatgaatcctggacctgctatggccagccacaaagaaggagaggaccgtttctttcctttgtctggatctttaatttttggcaaacaaggaactggaagagacaacgtggatgcggacaaagtcatgataaccaacgaagaagaaattaaaactactaacccggtagcaacggagtcctatggacaagtggccacaaaccacacgagtgcccaagcacaggcgcagaccggctgggttcaaaaccaaggaatacttccgggtatggtttggcaggacagagatgtgtacctgcaaggacccatttgggccaaaattcctcacacggacggcaactttcacccttctccgctgatgggagggtttggaatgaagcacccgcctcctcagatcctcatcaaaaacacacctgtacctgcggatcctccaacggccttcaacaaggacaagctgaactctttcatcacccagtattctactggccaagtcagcgtggagatcgagtgggagctgcagaaggaaaacagcaagcgctggaacccggagatccagtacacttccaactattacaagtctaataatgttgaatttgctgttaatactgaaggtgtatatagtgaaccccgccccattggcaccagatacctgactcgtaatctg

SEQ ID NO: 196 - protein, 736 aa, synthetic construct
  REGION 1..736: note = Adeno Associated Virus Capsid Protein Variant
MAADGYLPDWLEDNLSEGIREWWALKPGAPQPKANQQHQDNARGLVLPGYKYLGPGNGLDKGEPVNAADAAALEHDKAYDQQLKAGDNPYLKYNHADAEFQERLKEDTSFGGNLGRAVFQAKKRLLEPLGLVEEAAKTAPGKKRPVEQSPQEPDSSAGIGKSGAQPAKKRLNFGQTGDTESVPDPQPIGEPPAAPSGVGSLTMASGGGAPVADNNEGADGVGSSSGNWHCDSQWLGDRVITTSTRTWALPTYNNHLYKQISNSTSGGSSNDNAYFGYSTPWGYFDFNRFHCHFSPRDWQRLINNNWGFRPKRLNFKLFNIQVKEVTDNNGVKTIANNLTSTVQVFTDSDYQLPYVLGSAHEGCLPPFPADVFMIPQYGYLTLNDGSQAVGRSSFYCLEYFPSQMLRTGNNFQFSYEFENVPFHSSYAHSQSLDRLMNPLIDQYLYYLSKTINGSGQNQQTLKFSVAGPSNMAVQGRNYIPGPSYRQQRVSTTVTQNNNSEFAWPGASSWALNGRNSLMNPGPAMASHKEGEDRFFPLSGSLIFGKQGTGRDNVDADKVMITNEEEIKTTNPVATESYGQVATNHTSAQAQAQTGWVQNQGILPGMVWQDRDVYLQGPIWAKIPHTDGNFHPSPLMGGFGMKHPPPQILIKNTPVPADPPTAFNKDKLNSFITQYSTGQVSVEIEWELQKENSKRWNPEIQYTSNYYKSNNVEFAVNTEGVYSEPRPIGTRYLTRNL

SEQ ID NO: 197 - DNA, 2208 bp, synthetic construct
  misc_feature 1..2208: note = Adeno Associated Virus Capsid Protein Variant
  source 1..2208: mol_type = other DNA
atggctgccgatggttatcttccagattggctcgaggacaaccttagtgaaggaattcgcgagtggtgggctttgaaacctggagcccctcaacccaaggcaaatcaacaacatcaagacaacgctcgaggtcttgtgcttccgggttacaaataccttggacccggcaacggactcgacaagggggagccggtcaacgcagcagacgcggcggccctcgagcacgacaaggcctacgaccagcagctcaaggccggagacaacccgtacctcaagtacaaccacgccgacgccgagttccaggagcggctcaaagaagatacgtcttttgggggcaacctcgggcgagcagtcttccaggccaaaaagaggcttcttgaacctcttggtctggttgaggaagcggctaagacggctcctggaaagaagaggcctgtagagcagtctcctcaggaaccggactcctccgcgggtattggcaaatcgggtgcacagcccgctaaaaagagactcaatttcggtcagactggcgacacagagtcagtcccagaccctcaaccaatcggagaacctcccgcagccccctcaggtgtgggatctcttacaatggcttcaggtggtggcgcaccagtggcagacaataacgaaggtgccgatggagtgggtagttcctcgggaaattggcattgcgattcccaatggctgggggacagagtcatcaccaccagcacccgaacctgggccctgcccacctacaacaatcacctctacaagcaaatctccaacagcacatctggaggatcttcaaatgacaacgcctacttcggctacagcaccccctgggggtattttgacttcaacagattccactgccacttctcaccacgtgactggcagcgactcatcaacaacaactggggattccggcctaagcgactcaacttcaagctcttcaacattcaggtcaaagaggttacggacaacaatggagtcaagaccatcgccaataaccttaccagcacggtccaggtcttcacggactcagactatcagctcccgtacgtgctcgggtcggctcacgagggctgcctcccgccgttcccagcggacgttttcatgattcctcagtacgggtatctgacgcttaatgatggaagccaggccgtgggtcgttcgtccttttactgcctggaatatttcccgtcgcaaatgctaagaacgggtaacaacttccagttcagctacgagtttgagaacgtacctttccatagcagctacgctcacagccaaagcctggaccgactaatgaatccactcatcgaccaatacttgtactatctctcaaagactattaacggttctggacagaatcaacaaacgctaaaattcagtgtggccggacccagcaacatggctgtccagggaagaaactacatacctggacccagctaccgacaacaacgtgtctcaaccactgtgactcaaaacaacaacagcgaatttgcttggcctggagcttcttcttgggctctcaatggacgtaatagcttgatgaatcctggacctgctatggccagccacaaagaaggagagcagcgtttctttcctttgtctggatctttaatttttggcaaacaaggaactggaagagacaacgtggatgcggacaaagtcatgataaccaacgaagaagaaattaaaactactaacccggtagcaacggagtcctatggacaagtggccacaaaccaccagagtgcccaagcacaggcgcagaccggctgggttcaaaaccaaggaatacttccgggtatggtttggcaggacagagatgtgtacctgcaaggacccatttgggccaaaattcctcacacggacggcaactttcacccttctccgctgatgggagggtttggaatgaagcacccgcctcctcagatcctcatcaaaaacacacctgtacctgcggatcctccaacggccttcaacaaggacaagctgaactctttcatcacccagtattctactggccaagtcagcgtggagatcgagtgggagctgcagaaggaaaacagcaagcgctggaacccggagatccagtacacttccaactattacaagtctaataatgttgaatttgctgttaatactgaaggtgtatatagtgaaccccgccccattggcaccagatacctgactcgtaatctg

SEQ ID NO: 198 - protein, 736 aa, synthetic construct
  REGION 1..736: note = Adeno Associated Virus Capsid Protein Variant
MAADGYLPDWLEDNLSEGIREWWALKPGAPQPKANQQHQDNARGLVLPGYKYLGPGNGLDKGEPVNAADAAALEHDKAYDQQLKAGDNPYLKYNHADAEFQERLKEDTSFGGNLGRAVFQAKKRLLEPLGLVEEAAKTAPGKKRPVEQSPQEPDSSAGIGKSGAQPAKKRLNFGQTGDTESVPDPQPIGEPPAAPSGVGSLTMASGGGAPVADNNEGADGVGSSSGNWHCDSQWLGDRVITTSTRTWALPTYNNHLYKQISNSTSGGSSNDNAYFGYSTPWGYFDFNRFHCHFSPRDWQRLINNNWGFRPKRLNFKLFNIQVKEVTDNNGVKTIANNLTSTVQVFTDSDYQLPYVLGSAHEGCLPPFPADVFMIPQYGYLTLNDGSQAVGRSSFYCLEYFPSQMLRTGNNFQFSYEFENVPFHSSYAHSQSLDRLMNPLIDQYLYYLSKTINGSGQNQQTLKFSVAGPSNMAVQGRNYIPGPSYRQQRVSTTVTQNNNSEFAWPGASSWALNGRNSLMNPGPAMASHKEGEQRFFPLSGSLIFGKQGTGRDNVDADKVMITNEEEIKTTNPVATESYGQVATNHQSAQAQAQTGWVQNQGILPGMVWQDRDVYLQGPIWAKIPHTDGNFHPSPLMGGFGMKHPPPQILIKNTPVPADPPTAFNKDKLNSFITQYSTGQVSVEIEWELQKENSKRWNPEIQYTSNYYKSNNVEFAVNTEGVYSEPRPIGTRYLTRNL

SEQ ID NO: 199 - DNA, 2208 bp, synthetic construct
  misc_feature 1..2208: note = Adeno Associated Virus Capsid Protein Variant
  source 1..2208: mol_type = other DNA
atggctgccgatggttatcttccagattggctcgaggacaaccttagtgaaggaattcgcgagtggtgggctttgaaacctggagcccctcaacccaaggcaaatcaacaacatcaagacaacgctcgaggtcttgtgcttccgggttacaaataccttggacccggcaacggactcgacaagggggagccggtcaacgcagcagacgcggcggccctcgagcacgacaaggcctacgaccagcagctcaaggccggagacaacccgtacctcaagtacaaccacgccgacgccgagttccaggagcggctcaaagaagatacgtcttttgggggcaacctcgggcgagcagtcttccaggccaaaaagaggcttcttgaacctcttggtctggttgaggaagcggctaagacggctcctggaaagaagaggcctgtagagcagtctcctcaggaaccggactcctccgcgggtattggcaaatcgggtgcacagcccgctaaaaagagactcaatttcggtcagactggcgacacagagtcagtcccagaccctcaaccaatcggagaacctcccgcagccccctcaggtgtgggatctcttacaatggcttcaggtggtggcgcaccagtggcagacaataacgaaggtgccgatggagtgggtagttcctcgggaaattggcattgcgattcccaatggctgggggacagagtcatcaccaccagcacccgaacctgggccctgcccacctacaacaatcacctctacaagcaaatctccaacagcacatctggaggatcttcaaatgacaacgcctacttcggctacagcaccccctgggggtattttgacttcaacagattccactgccacttctcaccacgtgactggcagcgactcatcaacaacaactggggattccggcctaagcgactcaacttcaagctcttcaacattcaggtcaaagaggttacggacaacaatggagtcaagaccatcgccaataaccttaccagcacggtccaggtcttcacggactcagactatcagctcccgtacgtgctcgggtcggctcacgagggctgcctcccgccgttcccagcggacgttttcatgattcctcagtacgggtatctgacgcttaatgatggaagccaggccgtgggtcgttcgtccttttactgcctggaatatttcccgtcgcaaatgctaagaacgggtaacaacttccagttcagctacgagtttgagaacgtacctttccatagcagctacgctcacagccaaagcctggaccgactaatgaatccactcatcgaccaatacttgtactatctctcaaagactattaacggttctggacagaatcaacaaacgctaaaattcagtgtggccggacccagcaacatggctgtccagggaagaaactacatacctggacccagctaccgacaacaacgtgtctcaaccactgtgactcaaaacaacaacagcgaatttgcttggcctggagcttcttcttgggctctcaatggacgtaatagcttgatgaatcctggacctgctatggccagccacaaagaaggagaggaccgtttctttcctttgtctggatctttaatttttggcaaacaaggagcgggaagagacaacgtggatgcggacaaagtcatgataaccaacgaagaagaaattaaaactactaacccggtagcaacggagtcctatggacaagtggccacaaaccaccagagtgcccaagcacaggcgcagaccggctgggttcaaaaccaaggaatacttccgggtatggtttggcaggacagagatgtgtacctgcaaggacccatttgggccaaaattcctcacacggacggcaactttcacccttctccgctgatgggagggtttggaatgaagcacccgcctcctcagatcctcatcaaaaacacacctgtacctgcggatcctccaacggccttcaacaaggacaagctgaactctttcatcacccagtattctactggccaagtcagcgtggagatcgagtgggagctgcagaaggaaaacagcaagcgctggaacccggagatccagtacacttccaactattacaagtctaataatgttgaatttgctgttaatactgaaggtgtatatagtgaaccccgccccattggcaccagatacctgactcgtaatctg

SEQ ID NO: 200 - protein, 736 aa, synthetic construct
  REGION 1..736: note = Adeno Associated Virus Capsid Protein Variant
MAADGYLPDWLEDNLSEGIREWWALKPGAPQPKANQQHQDNARGLVLPGYKYLGPGNGLDKGEPVNAADAAALEHDKAYDQQLKAGDNPYLKYNHADAEFQERLKEDTSFGGNLGRAVFQAKKRLLEPLGLVEEAAKTAPGKKRPVEQSPQEPDSSAGIGKSGAQPAKKRLNFGQTGDTESVPDPQPIGEPPAAPSGVGSLTMASGGGAPVADNNEGADGVGSSSGNWHCDSQWLGDRVITTSTRTWALPTYNNHLYKQISNSTSGGSSNDNAYFGYSTPWGYFDFNRFHCHFSPRDWQRLINNNWGFRPKRLNFKLFNIQVKEVTDNNGVKTIANNLTSTVQVFTDSDYQLPYVLGSAHEGCLPPFPADVFMIPQYGYLTLNDGSQAVGRSSFYCLEYFPSQMLRTGNNFQFSYEFENVPFHSSYAHSQSLDRLMNPLIDQYLYYLSKTINGSGQNQQTLKFSVAGPSNMAVQGRNYIPGPSYRQQRVSTTVTQNNNSEFAWPGASSWALNGRNSLMNPGPAMASHKEGEDRFFPLSGSLIFGKQGAGRDNVDADKVMITNEEEIKTTNPVATESYGQVATNHQSAQAQAQTGWVQNQGILPGMVWQDRDVYLQGPIWAKIPHTDGNFHPSPLMGGFGMKHPPPQILIKNTPVPADPPTAFNKDKLNSFITQYSTGQVSVEIEWELQKENSKRWNPEIQYTSNYYKSNNVEFAVNTEGVYSEPRPIGTRYLTRNL

SEQ ID NO: 201 - DNA, 2208 bp, synthetic construct
  misc_feature 1..2208: note = Adeno Associated Virus Capsid Protein Variant
  source 1..2208: mol_type = other DNA
atggctgccgatggttatcttccagattggctcgaggacaaccttagtgaaggaattcgcgagtggtgggctttgaaacctggagcccctcaacccaaggcaaatcaacaacatcaagacaacgctcgaggtcttgtgcttccgggttacaaataccttggacccggcaacggactcgacaagggggagccggtcaacgcagcagacgcggcggccctcgagcacgacaaggcctacgaccagcagctcaaggccggagacaacccgtacctcaagtacaaccacgccgacgccgagttccaggagcggctcaaagaagatacgtcttttgggggcaacctcgggcgagcagtcttccaggccaaaaagaggcttcttgaacctcttggtctggttgaggaagcggctaagacggctcctggaaagaagaggcctgtagagcagtctcctcaggaaccggactcctccgcgggtattggcaaatcgggtgcacagcccgctaaaaagagactcaatttcggtcagactggcgacacagagtcagtcccagaccctcaaccaatcggagaacctcccgcagccccctcaggtgtgggatctcttacaatggcttcaggtggtggcgcaccagtggcagacaataacgaaggtgccgatggagtgggtagttcctcgggaaattggcattgcgattcccaatggctgggggacagagtcatcaccaccagcacccgaacctgggccctgcccacctacaacaatcacctctacaagcaaatctccaacagcacatctggaggatcttcaaatgacaacgcctacttcggctacagcaccccctgggggtattttgacttcaacagattccactgccacttctcaccacgtgactggcagcgactcatcaacaacaactggggattccggcctaagcgactcaacttcaagctcttcaacattcaggtcaaagaggttacggacaacaatggagtcaagaccatcgccaataaccttaccagcacggtccaggtcttcacggactcagactatcagctcccgtacgtgctcgggtcggctcacgagggctgcctcccgccgttcccagcggacgttttcatgattcctcagtacgggtatctgacgcttaatgatggaagccaggccgtgggtcgttcgtccttttactgcctggaatatttcccgtcgcaaatgctaagaacgggtaacaacttccagttcagctacgagtttgagaacgtacctttccatagcagctacgctcacagccaaagcctggaccgactaatgaatccactcatcgaccaatacttgtactatctctcaaagactattaacggttctggacagaatcaacaaacgctaaaattcagtgtggccggacccagcaacatggctgtccagggaagaaactacatacctggacccagctaccgacaacaacgtgtctcaaccactgtgactcaaaacaacaacagcgaatttgcttggcctggagcttcttcttgggctctcaatggacgtaatagcttgatgaatcctggacctgctatggccagccacaaagaaggagaggaccgtttctttcctttgtctggatctttaatttttggcaaacaaggaactggaagagacaacgtggatgcggacaaagtcatgataaccaacgaagaagaaattaaaactactaacccggtagcaacggagtcctatggacaagtggccacaaaccaccagagtgcccaagcacaggcgcagaccggctgggttcaaaaccaaggaatacttccgggtatggtttggcaggacagagatgtgtacctgcaaggacccatttgggccaaaattcctcacacggacggcaactttcacccttctccgctgatgggagggtttggaatgaagcacccgcctcctcagatcctcatcaaaaacacacctgtacctgcggatcctccaacggccttcaacaaggacaagaataactctttcatcacccagtattctactggccaagtcagcgtggagatcgagtgggagctgcagaaggaaaacagcaagcgctggaacccggagatccagtacacttccaactattacaagtctaataatgttgaatttgctgttaatactgaaggtgtatatagtgaaccccgccccattggcaccagatacctgactcgtaatctg

SEQ ID NO: 202 - protein, 736 aa, synthetic construct
  REGION 1..736: note = Adeno Associated Virus Capsid Protein Variant
MAADGYLPDWLEDNLSEGIREWWALKPGAPQPKANQQHQDNARGLVLPGYKYLGPGNGLDKGEPVNAADAAALEHDKAYDQQLKAGDNPYLKYNHADAEFQERLKEDTSFGGNLGRAVFQAKKRLLEPLGLVEEAAKTAPGKKRPVEQSPQEPDSSAGIGKSGAQPAKKRLNFGQTGDTESVPDPQPIGEPPAAPSGVGSLTMASGGGAPVADNNEGADGVGSSSGNWHCDSQWLGDRVITTSTRTWALPTYNNHLYKQISNSTSGGSSNDNAYFGYSTPWGYFDFNRFHCHFSPRDWQRLINNNWGFRPKRLNFKLFNIQVKEVTDNNGVKTIANNLTSTVQVFTDSDYQLPYVLGSAHEGCLPPFPADVFMIPQYGYLTLNDGSQAVGRSSFYCLEYFPSQMLRTGNNFQFSYEFENVPFHSSYAHSQSLDRLMNPLIDQYLYYLSKTINGSGQNQQTLKFSVAGPSNMAVQGRNYIPGPSYRQQRVSTTVTQNNNSEFAWPGASSWALNGRNSLMNPGPAMASHKEGEDRFFPLSGSLIFGKQGTGRDNVDADKVMITNEEEIKTTNPVATESYGQVATNHQSAQAQAQTGWVQNQGILPGMVWQDRDVYLQGPIWAKIPHTDGNFHPSPLMGGFGMKHPPPQILIKNTPVPADPPTAFNKDKNNSFITQYSTGQVSVEIEWELQKENSKRWNPEIQYTSNYYKSNNVEFAVNTEGVYSEPRPIGTRYLTRNL

SEQ ID NO: 203 - DNA, 2208 bp, synthetic construct
  misc_feature 1..2208: note = Adeno Associated Virus Capsid Protein Variant
  source 1..2208: mol_type = other DNA
atggctgccgatggttatcttccagattggctcgaggacaaccttagtgaaggaattcgcgagtggtgggctttgaaacctggagcccctcaacccaaggcaaatcaacaacatcaagacaacgctcgaggtcttgtgcttccgggttacaaataccttggacccggcaacggactcgacaagggggagccggtcaacgcagcagacgcggcggccctcgagcacgacaaggcctacgaccagcagctcaaggccggagacaacccgtacctcaagtacaaccacgccgacgccgagttccaggagcggctcaaagaagatacgtcttttgggggcaacctcgggcgagcagtcttccaggccaaaaagaggcttcttgaacctcttggtctggttgaggaagcggctaagacggctcctggaaagaagaggcctgtagagcagtctcctcaggaaccggactcctccgcgggtattggcaaatcgggtgcacagcccgctaaaaagagactcaatttcggtcagactggcgacacagagtcagtcccagaccctcaaccaatcggagaacctcccgcagccccctcaggtgtgggatctcttacaatggcttcaggtggtggcgcaccagtggcagacaataacgaaggtgccgatggagtgggtagttcctcgggaaattggcattgcgattcccaatggctgggggacagagtcatcaccaccagcacccgaacctgggccctgcccacctacaacaatcacctctacaagcaaatctccaacagcacatctggaggatcttcaaatgacaacgcctacttcggctacagcaccccctgggggtattttgacttcaacagattccactgccacttctcaccacgtgactggcagcgactcatcaacaacaactggggattccggcctaagcgactcaacttcaagctcttcaacattcaggtcaaagaggttacggacaacaatggagtcaagaccatcgccaataaccttaccagcacggtccaggtcttcacggactcagactatcagctcccgtacgtgctcgggtcggctcacgagggctgcctcccgccgttcccagcggacgttttcatgattcctcagtacgggtatctgacgcttaatgatggaagccaggccgtgggtcgttcgtccttttactgcctggaatatttcccgtcgcaaatgctaagaacgggtaacaacttccagttcagctacgagtttgagaacgtacctttccatagcagctacgctcacagccaaagcctggaccgactaatgaatccactcatcgaccaatacttgtactatctctcaaagactattaacggttctggacagaatcaacaaacgctaaaattcagtgtggccggacccagcaacatggctgtccagggaagaaactacatacctggacccagctaccgacaacaacgtgtctcaaccactgtgactcaaaacaacaacagcgaatttgcttggcctggagcttcttcttgggctctcaatggacgtaatagcttgatgaatcctggacctgctatggccagccacaaagaaggagaggaccgtttctttcctcggtctggatctttaatttttggcaaacaaggaactggaagagacaacgtggatgcggacaaagtcatgataaccaacgaagaagaaattaaaactactaacccggtagcaacggagtcctatggacaagtggccacaaaccaccagagtgcccaagcacaggcgcagaccggctgggttcaaaaccaaggaatacttccgggtatggtttggcaggacagagatgtgtacctgcaaggacccatttgggccaaaattcctcacacggacggcaactttcacccttctccgctgatgggagggtttggaatgaagcacccgcctcctcagatcctcatcaaaaacacacctgtacctgcggatcctccaacggccttcaacaaggacaagctgaactctttcatcacccagtattctactggccaagtcagcgtggagatcgagtgggagctgcagaaggaaaacagcaagcgctggaacccggagatccagtacacttccaactattacaagtctaataatgttgaatttgctgttaatactgaaggtgtatatagtgaaccccgccccattggcaccagatacctgactcgtaatctg

SEQ ID NO: 204 - protein, 736 aa, synthetic construct
  REGION 1..736: note = Adeno Associated Virus Capsid Protein Variant
MAADGYLPDWLEDNLSEGIREWWALKPGAPQPKANQQHQDNARGLVLPGYKYLGPGNGLDKGEPVNAADAAALEHDKAYDQQLKAGDNPYLKYNHADAEFQERLKEDTSFGGNLGRAVFQAKKRLLEPLGLVEEAAKTAPGKKRPVEQSPQEPDSSAGIGKSGAQPAKKRLNFGQTGDTESVPDPQPIGEPPAAPSGVGSLTMASGGGAPVADNNEGADGVGSSSGNWHCDSQWLGDRVITTSTRTWALPTYNNHLYKQISNSTSGGSSNDNAYFGYSTPWGYFDFNRFHCHFSPRDWQRLINNNWGFRPKRLNFKLFNIQVKEVTDNNGVKTIANNLTSTVQVFTDSDYQLPYVLGSAHEGCLPPFPADVFMIPQYGYLTLNDGSQAVGRSSFYCLEYFPSQMLRTGNNFQFSYEFENVPFHSSYAHSQSLDRLMNPLIDQYLYYLSKTINGSGQNQQTLKFSVAGPSNMAVQGRNYIPGPSYRQQRVSTTVTQNNNSEFAWPGASSWALNGRNSLMNPGPAMASHKEGEDRFFPRSGSLIFGKQGTGRDNVDADKVMITNEEEIKTTNPVATESYGQVATNHQSAQAQAQTGWVQNQGILPGMVWQDRDVYLQGPIWAKIPHTDGNFHPSPLMGGFGMKHPPPQILIKNTPVPADPPTAFNKDKLNSFITQYSTGQVSVEIEWELQKENSKRWNPEIQYTSNYYKSNNVEFAVNTEGVYSEPRPIGTRYLTRNL

SEQ ID NO: 205 - DNA, 2208 bp, synthetic construct
  misc_feature 1..2208: note = Adeno Associated Virus Capsid Protein Variant
  source 1..2208: mol_type = other DNA
atggctgccgatggttatcttccagattggctcgaggacaaccttagtgaaggaattcgcgagtggtgggctttgaaacctggagcccctcaacccaaggcaaatcaacaacatcaagacaacgctcgaggtcttgtgcttccgggttacaaataccttggacccggcaacggactcgacaagggggagccggtcaacgcagcagacgcggcggccctcgagcacgacaaggcctacgaccagcagctcaaggccggagacaacccgtacctcaagtacaaccacgccgacgccgagttccaggagcggctcaaagaagatacgtcttttgggggcaacctcgggcgagcagtcttccaggccaaaaagaggcttcttgaacctcttggtctggttgaggaagcggctaagacggctcctggaaagaagaggcctgtagagcagtctcctcaggaaccggactcctccgcgggtattggcaaatcgggtgcacagcccgctaaaaagagactcaatttcggtcagactggcgacacagagtcagtcccagaccctcaaccaatcggagaacctcccgcagccccctcaggtgtgggatctcttacaatggcttcaggtggtggcgcaccagtggcagacaataacgaaggtgccgatggagtgggtagttcctcgggaaattggcattgcgattcccaatggctgggggacagagtcatcaccaccagcacccgaacctgggccctgcccacctacaacaatcacctctacaagcaaatctccaacagcacatctggaggatcttcaaatgacaacgcctacttcggctacagcaccccctgggggtattttgacttcaacagattccactgccacttctcaccacgtgactggcagcgactcatcaacaacaactggggattccggcctaagcgactcaacttcaagctcttcaacattcaggtcaaagaggttacggacaacaatggagtcaagaccatcgccaataaccttaccagcacggtccaggtcttcacggactcagactatcagctcccgtacgtgctcgggtcggctcacgagggctgcctcccgccgttcccagcggacgttttcatgattcctcagtacgggtatctgacgcttaatgatggaagccaggccgtgggtcgttcgtccttttactgcctggaatatttcccgtcgcaaatgctaagaacgggtaacaacttccagttcagctacgagtttgagaacgtacctttccatagcagctacgctcacagccaaagcctggaccgactaatgaatccactcatcgaccaatacttgtactatctctcaaagactattaacggttctggacagaatcaacaaacgctaaaattcagtgtggccggacccagcaacatggctgtccagggaagaaactacatacctggacccagctaccgacaacaacgtgtctcaaccactgtgactcaaaacaacaacagcgaatttgcttggcctggagcttcttcttgggctctcaatggacgtaatagcttgatgaatcctggacctgctatggccagccacaaagaaggagaggaccgtttctttcctttgtctggatctttaatttttggcaaacaaggaactggaagagacaacgtggatgcggacaaagtcatgataaccaacgaagaagaaattaaaactactaacccggtagcaacggagtcctatggacaagtggccacaaaccaccaggtggcccaagcacaggcgcagaccggctgggttcaaaaccaaggaatacttccgggtatggtttggcaggacagagatgtgtacctgcaaggacccatttgggccaaaattcctcacacggacggcaactttcacccttctccgctgatgggagggtttggaatgaagcacccgcctcctcagatcctcatcaaaaacacacctgtacctgcggatcctccaacggccttcaacaaggacaagctgaactctttcatcacccagtattctactggccaagtcagcgtggagatcgagtgggagctgcagaaggaaaacagcaagcgctggaacccggagatccagtacacttccaactattacaagtctaataatgttgaatttgctgttaatactgaaggtgtatatagtgaaccccgccccattggcaccagatacctgactcgtaatctg

SEQ ID NO: 206 - protein, 736 aa, synthetic construct
  REGION 1..736: note = Adeno Associated Virus Capsid Protein Variant
MAADGYLPDWLEDNLSEGIREWWALKPGAPQPKANQQHQDNARGLVLPGYKYLGPGNGLDKGEPVNAADAAALEHDKAYDQQLKAGDNPYLKYNHADAEFQERLKEDTSFGGNLGRAVFQAKKRLLEPLGLVEEAAKTAPGKKRPVEQSPQEPDSSAGIGKSGAQPAKKRLNFGQTGDTESVPDPQPIGEPPAAPSGVGSLTMASGGGAPVADNNEGADGVGSSSGNWHCDSQWLGDRVITTSTRTWALPTYNNHLYKQISNSTSGGSSNDNAYFGYSTPWGYFDFNRFHCHFSPRDWQRLINNNWGFRPKRLNFKLFNIQVKEVTDNNGVKTIANNLTSTVQVFTDSDYQLPYVLGSAHEGCLPPFPADVFMIPQYGYLTLNDGSQAVGRSSFYCLEYFPSQMLRTGNNFQFSYEFENVPFHSSYAHSQSLDRLMNPLIDQYLYYLSKTINGSGQNQQTLKFSVAGPSNMAVQGRNYIPGPSYRQQRVSTTVTQNNNSEFAWPGASSWALNGRNSLMNPGPAMASHKEGEDRFFPLSGSLIFGKQGTGRDNVDADKVMITNEEEIKTTNPVATESYGQVATNHQVAQAQAQTGWVQNQGILPGMVWQDRDVYLQGPIWAKIPHTDGNFHPSPLMGGFGMKHPPPQILIKNTPVPADPPTAFNKDKLNSFITQYSTGQVSVEIEWELQKENSKRWNPEIQYTSNYYKSNNVEFAVNTEGVYSEPRPIGTRYLTRNL

SEQ ID NO: 207 - DNA, 2208 bp, synthetic construct
  misc_feature 1..2208: note = Adeno Associated Virus Capsid Protein Variant
  source 1..2208: mol_type = other DNA
atggctgccgatggttatcttccagattggctcgaggacaaccttagtgaaggaattcgcgagtggtgggctttgaaacctggagcccctcaacccaaggcaaatcaacaacatcaagacaacgctcgaggtcttgtgcttccgggttacaaataccttggacccggcaacggactcgacaagggggagccggtcaacgcagcagacgcggcggccctcgagcacgacaaggcctacgaccagcagctcaaggccggagacaacccgtacctcaagtacaaccacgccgacgccgagttccaggagcggctcaaagaagatacgtcttttgggggcaacctcgggcgagcagtcttccaggccaaaaagaggcttcttgaacctcttggtctggttgaggaagcggctaagacggctcctggaaagaagaggcctgtagagcagtctcctcaggaaccggactcctccgcgggtattggcaaatcgggtgcacagcccgctaaaaagagactcaatttcggtcagactggcgacacagagtcagtcccagaccctcaaccaatcggagaacctcccgcagccccctcaggtgtgggatctcttacaatggcttcaggtggtggcgcaccagtggcagacaataacgaaggtgccgatggagtgggtagttcctcgggaaattggcattgcgattcccaatggctgggggacagagtcatcaccaccagcacccgaacctgggccctgcccacctacaacaatcacctctacaagcaaatctccaacagcacatctggaggatcttcaaatgacaacgcctacttcggctacagcaccccctgggggtattttgacttcaacagattccactgccacttctcaccacgtgactggcagcgactcatcaacaacaactggggattccggcctaagcgactcaacttcaagctcttcaacattcaggtcaaagaggttacggacaacaatggagtcaagaccatcgccaataaccttaccagcacggtccaggtcttcacggactcagactatcagctcccgtacgtgctcgggtcggctcacgagggctgcctcccgccgttcccagcggacgttttcatgattcctcagtacgggtatctgacgcttaatgatggaagccaggccgtgggtcgttcgtccttttactgcctggaatatttcccgtcgcaaatgctaagaacgggtaacaacttccagttcagctacgagtttgagaacgtacctttccatagcagctacgctcacagccaaagcctggaccgactaatgaatccactcatcgaccaatacttgtactatctctcaaagactattaacggttctggacagcttcaacaaacgctaaaattcagtgtggccggacccagcaacatggctgtccagggaagaaactacatacctggacccagctaccgacaacaacgtgtctcaaccactgtgactcaaaacaacaacagcgaatttgcttggcctggagcttcttcttgggctctcaatggacgtaatagcttgatgaatcctggacctgctatggccagccacaaagaaggagaggaccgtttctttcctttgtctggatctttaatttttggcaaacaaggaactggaagagacaacgtggatgcggacaaagtcatgataaccaacgaagaagaaattaaaactactaacccggtagcaacggagtcctatggacaagtggccacaaaccaccagagtgcccaagcacaggcgcagaccggctgggttcaaaaccaaggaatacttccgggtatggtttggcaggacagagatgtgtacctgcaaggacccatttgggccaaaattcctcacacggacggcaactttcacccttctccgctgatgggagggtttggaatgaagcacccgcctcctcagatcctcatcaaaaacacacctgtacctgcggatcctccaacggccttcaacaaggacaagctgaactctttcatcacccagtattctactggccaagtcagcgtggagatcgagtgggagctgcagaaggaaaacagcaagcgctggaacccggagatccagtacacttccaactattacaagtctaataatgttgaatttgctgttaatactgaaggtgtatatagtgaaccccgccccattggcaccagatacctgactcgtaatctg

SEQ ID NO: 208 - protein, 736 aa, synthetic construct
  REGION 1..736: note = Adeno Associated Virus Capsid Protein Variant
MAADGYLPDWLEDNLSEGIREWWALKPGAPQPKANQQHQDNARGLVLPGYKYLGPGNGLDKGEPVNAADAAALEHDKAYDQQLKAGDNPYLKYNHADAEFQERLKEDTSFGGNLGRAVFQAKKRLLEPLGLVEEAAKTAPGKKRPVEQSPQEPDSSAGIGKSGAQPAKKRLNFGQTGDTESVPDPQPIGEPPAAPSGVGSLTMASGGGAPVADNNEGADGVGSSSGNWHCDSQWLGDRVITTSTRTWALPTYNNHLYKQISNSTSGGSSNDNAYFGYSTPWGYFDFNRFHCHFSPRDWQRLINNNWGFRPKRLNFKLFNIQVKEVTDNNGVKTIANNLTSTVQVFTDSDYQLPYVLGSAHEGCLPPFPADVFMIPQYGYLTLNDGSQAVGRSSFYCLEYFPSQMLRTGNNFQFSYEFENVPFHSSYAHSQSLDRLMNPLIDQYLYYLSKTINGSGQLQQTLKFSVAGPSNMAVQGRNYIPGPSYRQQRVSTTVTQNNNSEFAWPGASSWALNGRNSLMNPGPAMASHKEGEDRFFPLSGSLIFGKQGTGRDNVDADKVMITNEEEIKTTNPVATESYGQVATNHQSAQAQAQTGWVQNQGILPGMVWQDRDVYLQGPIWAKIPHTDGNFHPSPLMGGFGMKHPPPQILIKNTPVPADPPTAFNKDKLNSFITQYSTGQVSVEIEWELQKENSKRWNPEIQYTSNYYKSNNVEFAVNTEGVYSEPRPIGTRYLTRNL

SEQ ID NO: 209 - DNA, 2208 bp, synthetic construct
  misc_feature 1..2208: note = Adeno Associated Virus Capsid Protein Variant
  source 1..2208: mol_type = other DNA
atggctgccgatggttatcttccagattggctcgaggacaaccttagtgaaggaattcgcgagtggtgggctttgaaacctggagcccctcaacccaaggcaaatcaacaacatcaagacaacgctcgaggtcttgtgcttccgggttacaaataccttggacccggcaacggactcgacaagggggagccggtcaacgcagcagacgcggcggccctcgagcacgacaaggcctacgaccagcagctcaaggccggagacaacccgtacctcaagtacaaccacgccgacgccgagttccaggagcggctcaaagaagatacgtcttttgggggcaacctcgggcgagcagtcttccaggccaaaaagaggcttcttgaacctcttggtctggttgaggaagcggctaagacggctcctggaaagaagaggcctgtagagcagtctcctcaggaaccggactcctccgcgggtattggcaaatcgggtgcacagcccgctaaaaagagactcaatttcggtcagactggcgacacagagtcagtcccagaccctcaaccaatcggagaacctcccgcagccccctcaggtgtgggatctcttacaatggcttcaggtggtggcgcaccagtggcagacaataacgaaggtgccgatggagtgggtagttcctcgggaaattggcattgcgattcccaatggctgggggacagagtcatcaccaccagcacccgaacctgggccctgcccacctacaacaatcacctctacaagcaaatctccaacagcacatctggaggatcttcaaatgacaacgcctacttcggctacagcaccccctgggggtattttgacttcaacagattccactgccacttctcaccacgtgactggcagcgactcatcaacaacaactggggattccggcctaagcgactcaacttcaagctcttcaacattcaggtcaaagaggttacggacaacaatggagtcaagaccatcgccaataaccttaccagcacggtccaggtcttcacggactcagactatcagctcccgtacgtgctcgggtcggctcacgagggctgcctcccgccgttcccagcggacgttttcatgattcctcagtacgggtatctgacgcttaatgatggaagccaggccgtgggtcgttcgtccttttactgcctggaatatttcccgtcgcaaatgctaagaacgggtaacaacttccagttcagctacgagtttgagaacgtacctttccatagcagctacgctcacagccaaagcctggaccgactaatgaatccactcatcgaccaatacttgtactatctctcaaagactattaacggttctggacagaatcaacaaacgctaaaattcagtgtggccggacccagcaacatggctgtccagggaagaaactacatacctggacccagctaccgacaacaacgtgtctcaaccactgtgactcaaaacaacaacagcgaatttgcttggcctggagcttcttcttgggctctcaatggacgtaatagcttgatgaatcctggacctgctatggccagccacaaagaaggagaggaccgtttctttcctttgtctggatctttaatttttggcaaacaatggactggaagagacaacgtggatgcggacaaagtcatgataaccaacgaagaagaaattaaaactactaacccggtagcaacggagtcctatggacaagtggccacaaaccaccagagtgcccaagcacaggcgcagaccggctgggttcaaaaccaaggaatacttccgggtatggtttggcaggacagagatgtgtacctgcaaggacccatttgggccaaaattcctcacacggacggcaactttcacccttctccgctgatgggagggtttggaatgaagcacccgcctcctcagatcctcatcaaaaacacacctgtacctgcggatcctccaacggccttcaacaaggacaagctgaactctttcatcacccagtattctactggccaagtcagcgtggagatcgagtgggagctgcagaaggaaaacagcaagcgctggaacccggagatccagtacacttccaactattacaagtctaataatgttgaatttgctgttaatactgaaggtgtatatagtgaaccccgccccattggcaccagatacctgactcgtaatctg

SEQ ID NO: 210 - protein, 736 aa, synthetic construct
  REGION 1..736: note = Adeno Associated Virus Capsid Protein Variant
MAADGYLPDWLEDNLSEGIREWWALKPGAPQPKANQQHQDNARGLVLPGYKYLGPGNGLDKGEPVNAADAAALEHDKAYDQQLKAGDNPYLKYNHADAEFQERLKEDTSFGGNLGRAVFQAKKRLLEPLGLVEEAAKTAPGKKRPVEQSPQEPDSSAGIGKSGAQPAKKRLNFGQTGDTESVPDPQPIGEPPAAPSGVGSLTMASGGGAPVADNNEGADGVGSSSGNWHCDSQWLGDRVITTSTRTWALPTYNNHLYKQISNSTSGGSSNDNAYFGYSTPWGYFDFNRFHCHFSPRDWQRLINNNWGFRPKRLNFKLFNIQVKEVTDNNGVKTIANNLTSTVQVFTDSDYQLPYVLGSAHEGCLPPFPADVFMIPQYGYLTLNDGSQAVGRSSFYCLEYFPSQMLRTGNNFQFSYEFENVPFHSSYAHSQSLDRLMNPLIDQYLYYLSKTINGSGQNQQTLKFSVAGPSNMAVQGRNYIPGPSYRQQRVSTTVTQNNNSEFAWPGASSWALNGRNSLMNPGPAMASHKEGEDRFFPLSGSLIFGKQWTGRDNVDADKVMITNEEEIKTTNPVATESYGQVATNHQSAQAQAQTGWVQNQGILPGMVWQDRDVYLQGPIWAKIPHTDGNFHPSPLMGGFGMKHPPPQILIKNTPVPADPPTAFNKDKLNSFITQYSTGQVSVEIEWELQKENSKRWNPEIQYTSNYYKSNNVEFAVNTEGVYSEPRPIGTRYLTRNL

SEQ ID NO: 211 - DNA, 2208 bp, synthetic construct
  misc_feature 1..2208: note = Adeno Associated Virus Capsid Protein Variant
  source 1..2208: mol_type = other DNA
atggctgccgatggttatcttccagattggctcgaggacaaccttagtgaaggaattcgcgagtggtgggctttgaaacctggagcccctcaacccaaggcaaatcaacaacatcaagacaacgctcgaggtcttgtgcttccgggttacaaataccttggacccggcaacggactcgacaagggggagccggtcaacgcagcagacgcggcggccctcgagcacgacaaggcctacgaccagcagctcaaggccggagacaacccgtacctcaagtacaaccacgccgacgccgagttccaggagcggctcaaagaagatacgtcttttgggggcaacctcgggcgagcagtcttccaggccaaaaagaggcttcttgaacctcttggtctggttgaggaagcggctaagacggctcctggaaagaagaggcctgtagagcagtctcctcaggaaccggactcctccgcgggtattggcaaatcgggtgcacagcccgctaaaaagagactcaatttcggtcagactggcgacacagagtcagtcccagaccctcaaccaatcggagaacctcccgcagccccctcaggtgtgggatctcttacaatggcttcaggtggtggcgcaccagtggcagacaataacgaaggtgccgatggagtgggtagttcctcgggaaattggcattgcgattcccaatggctgggggacagagtcatcaccaccagcacccgaacctgggccctgcccacctacaacaatcacctctacaagcaaatctccaacagcacatctggaggatcttcaaatgacaacgcctacttcggctacagcaccccctgggggtattttgacttcaacagattccactgccacttctcaccacgtgactggcagcgactcatcaacaacaactggggattccggcctaagcgactcaacttcaagctcttcaacattcaggtcaaagaggttacggacaacaatggagtcaagaccatcgccaataaccttaccagcacggtccaggtcttcacggactcagactatcagctcccgtacgtgctcgggtcggctcacgagggctgcctcccgccgttcccagcggacgttttcatgattcctcagtacgggtatctgacgcttaatgatggaagccaggccgtgggtcgttcgtccttttactgcctggaatatttcccgtcgcaaatgctaagaacgggtaacaacttccagttcagctacgagtttgagaacgtacctttccatagcagctacgctcacagccaaagcctggaccgactaatgaatccactcatcgaccaatacttgtactatctctcaaagactattaacggttctggacagaatcaacaaacgctaaaattcagtgtggccggacccagcaacatggctgtccagggaagaaactacatacctggacccagctaccgacaacaacgtgtctcaaccgtggtgactcaaaacaacaacagcgaatttgcttggcctggagcttcttcttgggctctcaatggacgtaatagcttgatgaatcctggacctgctatggccagccacaaagaaggagaggaccgtttctttcctttgtctggatctttaatttttggcaaacaaggaactggaagagacaacgtggatgcggacaaagtcatgataaccaacgaagaagaaattaaaactactaacccggtagcaacggagtcctatggacaagtggccacaaaccaccagagtgcccaagcacaggcgcagaccggctgggttcaaaaccaaggaatacttccgggtatggtttggcaggacagagatgtgtacctgcaaggacccatttgggccaaaattcctcacacggacggcaactttcacccttctccgctgatgggagggtttggaatgaagcacccgcctcctcagatcctcatcaaaaacacacctgtacctgcggatcctccaacggccttcaacaaggacaagctgaactctttcatcacccagtattctactggccaagtcagcgtggagatcgagtgggagctgcagaaggaaaacagcaagcgctggaacccggagatccagtacacttccaactattacaagtctaataatgttgaatttgctgttaatactgaaggtgtatatagtgaaccccgccccattggcaccagatacctgactcgtaatctg

SEQ ID NO: 212 - protein, 736 aa, synthetic construct
  REGION 1..736: note = Adeno Associated Virus Capsid Protein Variant
MAADGYLPDWLEDNLSEGIREWWALKPGAPQPKANQQHQDNARGLVLPGYKYLGPGNGLDKGEPVNAADAAALEHDKAYDQQLKAGDNPYLKYNHADAEFQERLKEDTSFGGNLGRAVFQAKKRLLEPLGLVEEAAKTAPGKKRPVEQSPQEPDSSAGIGKSGAQPAKKRLNFGQTGDTESVPDPQPIGEPPAAPSGVGSLTMASGGGAPVADNNEGADGVGSSSGNWHCDSQWLGDRVITTSTRTWALPTYNNHLYKQISNSTSGGSSNDNAYFGYSTPWGYFDFNRFHCHFSPRDWQRLINNNWGFRPKRLNFKLFNIQVKEVTDNNGVKTIANNLTSTVQVFTDSDYQLPYVLGSAHEGCLPPFPADVFMIPQYGYLTLNDGSQAVGRSSFYCLEYFPSQMLRTGNNFQFSYEFENVPFHSSYAHSQSLDRLMNPLIDQYLYYLSKTINGSGQNQQTLKFSVAGPSNMAVQGRNYIPGPSYRQQRVSTVVTQNNNSEFAWPGASSWALNGRNSLMNPGPAMASHKEGEDRFFPLSGSLIFGKQGTGRDNVDADKVMITNEEEIKTTNPVATESYGQVATNHQSAQAQAQTGWVQNQGILPGMVWQDRDVYLQGPIWAKIPHTDGNFHPSPLMGGFGMKHPPPQILIKNTPVPADPPTAFNKDKLNSFITQYSTGQVSVEIEWELQKENSKRWNPEIQYTSNYYKSNNVEFAVNTEGVYSEPRPIGTRYLTRNL

SEQ ID NO: 213 - DNA, 2208 bp, synthetic construct
  misc_feature 1..2208: note = Adeno Associated Virus Capsid Protein Variant
  source 1..2208: mol_type = other DNA
atggctgccgatggttatcttccagattggctcgaggacaaccttagtgaaggaattcgcgagtggtgggctttgaaacctggagcccctcaacccaaggcaaatcaacaacatcaagacaacgctcgaggtcttgtgcttccgggttacaaataccttggacccggcaacggactcgacaagggggagccggtcaacgcagcagacgcggcggccctcgagcacgacaaggcctacgaccagcagctcaaggccggagacaacccgtacctcaagtacaaccacgccgacgccgagttccaggagcggctcaaagaagatacgtcttttgggggcaacctcgggcgagcagtcttccaggccaaaaagaggcttcttgaacctcttggtctggttgaggaagcggctaagacggctcctggaaagaagaggcctgtagagcagtctcctcaggaaccggactcctccgcgggtattggcaaatcgggtgcacagcccgctaaaaagagactcaatttcggtcagactggcgacacagagtcagtcccagaccctcaaccaatcggagaacctcccgcagccccctcaggtgtgggatctcttacaatggcttcaggtggtggcgcaccagtggcagacaataacgaaggtgccgatggagtgggtagttcctcgggaaattggcattgcgattcccaatggctgggggacagagtcatcaccaccagcacccgaacctgggccctgcccacctacaacaatcacctctacaagcaaatctccaacagcacatctggaggatcttcaaatgacaacgcctacttcggctacagcaccccctgggggtattttgacttcaacagattccactgccacttctcaccacgtgactggcagcgactcatcaacaacaactggggattccggcctaagcgactcaacttcaagctcttcaacattcaggtcaaagaggttacggacaacaatggagtcaagaccatcgccaataaccttaccagcacggtccaggtcttcacggactcagactatcagctcccgtacgtgctcgggtcggctcacgagggctgcctcccgccgttcccagcggacgttttcatgattcctcagtacgggtatctgacgcttaatgatggaagccaggccgtgggtcgttcgtccttttactgcctggaatatttcccgtcgcaaatgctaagaacgggtaacaacttccagttcagctacgagtttgagaacgtacctttccatagcagctacgctcacagccaaagcctggaccgactaatgaatccactcatcgaccaatacttgtactatctctcaaagactattgggggttctggacagaatcaacaaacgctaaaattcagtgtggccggacccagcaacatggctgtccagggaagaaactacatacctggacccagctaccgacaacaacgtgtctcaaccactgtgactcaaaacaacaacagcgaatttgcttggcctggagcttcttcttgggctctcaatggacgtaatagcttgatgaatcctggacctgctatggccagccacaaagaaggagaggaccgtttctttcctttgtctggatctttaatttttggcaaacaaggaactggaagagacaacgtggatgcggacaaagtcatgataaccaacgaagaagaaattaaaactactaacccggtagcaacggagtcctatggacaagtggccacaaaccaccagagtgcccaagcacaggcgcagaccggctgggttcaaaaccaaggaatacttccgggtatggtttggcaggacagagatgtgtacctgcaaggacccatttgggccaaaattcctcacacggacggcaactttcacccttctccgctgatgggagggtttggaatgaagcacccgcctcctcagatcctcatcaaaaacacacctgtacctgcggatcctccaacggccttcaacaaggacaagctgaactctttcatcacccagtattctactggccaagtcagcgtggagatcgagtgggagctgcagaaggaaaacagcaagcgctggaacccggagatccagtacacttccaactattacaagtctaataatgttgaatttgctgttaatactgaaggtgtatatagtgaaccccgccccattggcaccagatacctgactcgtaatctg

SEQ ID NO: 214 - protein, 736 aa, synthetic construct
  REGION 1..736: note = Adeno Associated Virus Capsid Protein Variant
MAADGYLPDWLEDNLSEGIREWWALKPGAPQPKANQQHQDNARGLVLPGYKYLGPGNGLDKGEPVNAADAAALEHDKAYDQQLKAGDNPYLKYNHADAEFQERLKEDTSFGGNLGRAVFQAKKRLLEPLGLVEEAAKTAPGKKRPVEQSPQEPDSSAGIGKSGAQPAKKRLNFGQTGDTESVPDPQPIGEPPAAPSGVGSLTMASGGGAPVADNNEGADGVGSSSGNWHCDSQWLGDRVITTSTRTWALPTYNNHLYKQISNSTSGGSSNDNAYFGYSTPWGYFDFNRFHCHFSPRDWQRLINNNWGFRPKRLNFKLFNIQVKEVTDNNGVKTIANNLTSTVQVFTDSDYQLPYVLGSAHEGCLPPFPADVFMIPQYGYLTLNDGSQAVGRSSFYCLEYFPSQMLRTGNNFQFSYEFENVPFHSSYAHSQSLDRLMNPLIDQYLYYLSKTIGGSGQNQQTLKFSVAGPSNMAVQGRNYIPGPSYRQQRVSTTVTQNNNSEFAWPGASSWALNGRNSLMNPGPAMASHKEGEDRFFPLSGSLIFGKQGTGRDNVDADKVMITNEEEIKTTNPVATESYGQVATNHQSAQAQAQTGWVQNQGILPGMVWQDRDVYLQGPIWAKIPHTDGNFHPSPLMGGFGMKHPPPQILIKNTPVPADPPTAFNKDKLNSFITQYSTGQVSVEIEWELQKENSKRWNPEIQYTSNYYKSNNVEFAVNTEGVYSEPRPIGTRYLTRNL

SEQ ID NO: 215 - DNA, 2208 bp, synthetic construct
  misc_feature 1..2208: note = Adeno Associated Virus Capsid Protein Variant
  source 1..2208: mol_type = other DNA
atggctgccgatggttatcttccagattggctcgaggacaaccttagtgaaggaattcgcgagtggtgggctttgaaacctggagcccctcaacccaaggcaaatcaacaacatcaagacaacgctcgaggtcttgtgcttccgggttacaaataccttggacccggcaacggactcgacaagggggagccggtcaacgcagcagacgcggcggccctcgagcacgacaaggcctacgaccagcagctcaaggccggagacaacccgtacctcaagtacaaccacgccgacgccgagttccaggagcggctcaaagaagatacgtcttttgggggcaacctcgggcgagcagtcttccaggccaaaaagaggcttcttgaacctcttggtctggttgaggaagcggctaagacggctcctggaaagaagaggcctgtagagcagtctcctcaggaaccggactcctccgcgggtattggcaaatcgggtgcacagcccgctaaaaagagactcaatttcggtcagactggcgacacagagtcagtcccagaccctcaaccaatcggagaacctcccgcagccccctcaggtgtgggatctcttacaatggcttcaggtggtggcgcaccagtggcagacaataacgaaggtgccgatggagtgggtagttcctcgggaaattggcattgcgattcccaatggctgggggacagagtcatcaccaccagcacccgaacctgggccctgcccacctacaacaatcacctctacaagcaaatctccaacagcacatctggaggatcttcaaatgacaacgcctacttcggctacagcaccccctgggggtattttgacttcaacagattccactgccacttctcaccacgtgactggcagcgactcatcaacaacaactggggattccggcctaagcgactcaacttcaagctcttcaacattcaggtcaaagaggttacggacaacaatggagtcaagaccatcgccaataaccttaccagcacggtccaggtcttcacggactcagactatcagctcccgtacgtgctcgggtcggctcacgagggctgcctcccgccgttcccagcggacgttttcatgattcctcagtacgggtatctgacgcttaatgatggaagccaggccgtgggtcgttcgtccttttactgcctggaatatttcccgtcgcaaatgctaagaacgggtaacaacttccagttcagctacgagtttgagaacgtacctttccatagcagctacgctcacagccaaagcctggaccgactaatgaatccactcatcgaccaatacttgtactatctctcaaagactattaacggttctggacagaatcaacaaacgctaaaattcagtgtggccggacccagcaacatggctgtccagggaagaaactacatacctggacccagctaccgacaacaacgtgtctcaaccactgtgactcaaaacaacaacagcgaatttgcttggcctggagcttcttcttgggctctcaatggacgtaatagcttgatgaatcctggacctgctatggccagccacaaagaaggagaggaccgtttctttcctttgtctggatctttaatttttggcaaacaaggaactatgagagacaacgtggatgcggacaaagtcatgataaccaacgaagaagaaattaaaactactaacccggtagcaacggagtcctatggacaagtggccacaaaccaccagagtgcccaagcacaggcgcagaccggctgggttcaaaaccaaggaatacttccgggtatggtttggcaggacagagatgtgtacctgcaaggacccatttgggccaaaattcctcacacggacggcaactttcacccttctccgctgatgggagggtttggaatgaagcacccgcctcctcagatcctcatcaaaaacacacctgtacctgcggatcctccaacggccttcaacaaggacaagctgaactctttcatcacccagtattctactggccaagtcagcgtggagatcgagtgggagctgcagaaggaaaacagcaagcgctggaacccggagatccagtacacttccaactattacaagtctaataatgttgaatttgctgttaatactgaaggtgtatatagtgaaccccgccccattggcaccagatacctgactcgtaatctg

SEQ ID NO: 216 - protein, 736 aa, synthetic construct
  REGION 1..736: note = Adeno Associated Virus Capsid Protein Variant
MAADGYLPDWLEDNLSEGIREWWALKPGAPQPKANQQHQDNARGLVLPGYKYLGPGNGLDKGEPVNAADAAALEHDKAYDQQLKAGDNPYLKYNHADAEFQERLKEDTSFGGNLGRAVFQAKKRLLEPLGLVEEAAKTAPGKKRPVEQSPQEPDSSAGIGKSGAQPAKKRLNFGQTGDTESVPDPQPIGEPPAAPSGVGSLTMASGGGAPVADNNEGADGVGSSSGNWHCDSQWLGDRVITTSTRTWALPTYNNHLYKQISNSTSGGSSNDNAYFGYSTPWGYFDFNRFHCHFSPRDWQRLINNNWGFRPKRLNFKLFNIQVKEVTDNNGVKTIANNLTSTVQVFTDSDYQLPYVLGSAHEGCLPPFPADVFMIPQYGYLTLNDGSQAVGRSSFYCLEYFPSQMLRTGNNFQFSYEFENVPFHSSYAHSQSLDRLMNPLIDQYLYYLSKTINGSGQNQQTLKFSVAGPSNMAVQGRNYIPGPSYRQQRVSTTVTQNNNSEFAWPGASSWALNGRNSLMNPGPAMASHKEGEDRFFPLSGSLIFGKQGTMRDNVDADKVMITNEEEIKTTNPVATESYGQVATNHQSAQAQAQTGWVQNQGILPGMVWQDRDVYLQGPIWAKIPHTDGNFHPSPLMGGFGMKHPPPQILIKNTPVPADPPTAFNKDKLNSFITQYSTGQVSVEIEWELQKENSKRWNPEIQYTSNYYKSNNVEFAVNTEGVYSEPRPIGTRYLTRNL

SEQ ID NO: 217 - DNA, 2208 bp, synthetic construct
  misc_feature 1..2208: note = Adeno Associated Virus Capsid Protein Variant
  source 1..2208: mol_type = other DNA
atggctgccgatggttatcttccagattggctcgaggacaaccttagtgaaggaattcgcgagtggtgggctttgaaacctggagcccctcaacccaaggcaaatcaacaacatcaagacaacgctcgaggtcttgtgcttccgggttacaaataccttggacccggcaacggactcgacaagggggagccggtcaacgcagcagacgcggcggccctcgagcacgacaaggcctacgaccagcagctcaaggccggagacaacccgtacctcaagtacaaccacgccgacgccgagttccaggagcggctcaaagaagatacgtcttttgggggcaacctcgggcgagcagtcttccaggccaaaaagaggcttcttgaacctcttggtctggttgaggaagcggctaagacggctcctggaaagaagaggcctgtagagcagtctcctcaggaaccggactcctccgcgggtattggcaaatcgggtgcacagcccgctaaaaagagactcaatttcggtcagactggcgacacagagtcagtcccagaccctcaaccaatcggagaacctcccgcagccccctcaggtgtgggatctcttacaatggcttcaggtggtggcgcaccagtggcagacaataacgaaggtgccgatggagtgggtagttcctcgggaaattggcattgcgattcccaatggctgggggacagagtcatcaccaccagcacccgaacctgggccctgcccacctacaacaatcacctctacaagcaaatctccaacagcacatctggaggatcttcaaatgacaacgcctacttcggctacagcaccccctgggggtattttgacttcaacagattccactgccacttctcaccacgtgactggcagcgactcatcaacaacaactggggattccggcctaagcgactcaacttcaagctcttcaacattcaggtcaaagaggttacggacaacaatggagtcaagaccatcgccaataaccttaccagcacggtccaggtcttcacggactcagactatcagctcccgtacgtgctcgggtcggctcacgagggctgcctcccgccgttcccagcggacgttttcatgattcctcagtacgggtatctgacgcttaatgatggaagccaggccgtgggtcgttcgtccttttactgcctggaatatttcccgtcgcaaatgctaagaacgggtaacaacttccagttcagctacgagtttgagaacgtacctttccatagcagctacgctcacagccaaagcctggaccgactaatgaatccactcatcgaccaatacttgtactatctctcaaagactattaacggttctggacagaatcaacaaacgctaaaattcagtgtggccggacccagcaacatggctgtccagggaagaaactacatacctggacccagctaccgacaacaacgtgtctcaaccactgtgactcaaaacaacaacagcgaatttgcttggcctggagcttcttcttgggctctcaatggacgtaatagcttgatgaatcctggacctgctatggccagccacaaagaaggagaggaccgtttctttcctttgtctggatctttaatttttggcaaacaaggaactggaagagacaacgtggatgcggacaaagtcatgataaccaacgaagaagaaattaaaactactaatccggtagcaacggagtcctatggacaagtggccacaaaccaccagagtgcccaagcacaggcgcagaccggctgggttcaaaaccaaggaatacttccgggtatggtttggcaggacagagatgtgtacctgcaaggacccatttgggccaaaattcctcacacggacggcaactttcacccttctccgctgatgggagggtttggaatgaagcacccgcctcctcagatcctcatcaaaaacacacctgtacctgcggatcctccaacggccttcaacaaggacaagctgaactctttcatcacccagtattctactggccaagtcagcgtggagatcgagtgggagctgcagaaggaaaacagcaagcgctggaacccggagatccagtacacttccaactattacaagtctaatgttgttgaatttgctgttaatactgaaggtgtatatagtgaaccccgccccattggcaccagatacctgactcgtaatctg

SEQ ID NO: 218 - protein, 736 aa, synthetic construct
  REGION 1..736: note = Adeno Associated Virus Capsid Protein Variant
MAADGYLPDWLEDNLSEGIREWWALKPGAPQPKANQQHQDNARGLVLPGYKYLGPGNGLDKGEPVNAADAAALEHDKAYDQQLKAGDNPYLKYNHADAEFQERLKEDTSFGGNLGRAVFQAKKRLLEPLGLVEEAAKTAPGKKRPVEQSPQEPDSSAGIGKSGAQPAKKRLNFGQTGDTESVPDPQPIGEPPAAPSGVGSLTMASGGGAPVADNNEGADGVGSSSGNWHCDSQWLGDRVITTSTRTWALPTYNNHLYKQISNSTSGGSSNDNAYFGYSTPWGYFDFNRFHCHFSPRDWQRLINNNWGFRPKRLNFKLFNIQVKEVTDNNGVKTIANNLTSTVQVFTDSDYQLPYVLGSAHEGCLPPFPADVFMIPQYGYLTLNDGSQAVGRSSFYCLEYFPSQMLRTGNNFQFSYEFENVPFHSSYAHSQSLDRLMNPLIDQYLYYLSKTINGSGQNQQTLKFSVAGPSNMAVQGRNYIPGPSYRQQRVSTTVTQNNNSEFAWPGASSWALNGRNSLMNPGPAMASHKEGEDRFFPLSGSLIFGKQGTGRDNVDADKVMITNEEEIKTTNPVATESYGQVATNHQSAQAQAQTGWVQNQGILPGMVWQDRDVYLQGPIWAKIPHTDGNFHPSPLMGGFGMKHPPPQILIKNTPVPADPPTAFNKDKLNSFITQYSTGQVSVEIEWELQKENSKRWNPEIQYTSNYYKSNVVEFAVNTEGVYSEPRPIGTRYLTRNL

SEQ ID NO: 219 - DNA, 2208 bp, synthetic construct
  misc_feature 1..2208: note = Adeno Associated Virus Capsid Protein Variant
  source 1..2208: mol_type = other DNA
atggctgccgatggttatcttccagattggctcgaggacaaccttagtgaaggaattcgcgagtggtgggctttgaaacctggagcccctcaacccaaggcaaatcaacaacatcaagacaacgctcgaggtcttgtgcttccgggttacaaataccttggacccggcaacggactcgacaagggggagccggtcaacgcagcagacgcggcggccctcgagcacgacaaggcctacgaccagcagctcaaggccggagacaacccgtacctcaagtacaaccacgccgacgccgagttccaggagcggctcaaagaagatacgtcttttgggggcaacctcgggcgagcagtcttccaggccaaaaagaggcttcttgaacctcttggtctggttgaggaagcggctaagacggctcctggaaagaagaggcctgtagagcagtctcctcaggaaccggactcctccgcgggtattggcaaatcgggtgcacagcccgctaaaaagagactcaatttcggtcagactggcgacacagagtcagtcccagaccctcaaccaatcggagaacctcccgcagccccctcaggtgtgggatctcttacaatggcttcaggtggtggcgcaccagtggcagacaataacgaaggtgccgatggagtgggtagttcctcgggaaattggcattgcgattcccaatggctgggggacagagtcatcaccaccagcacccgaacctgggccctgcccacctacaacaatcacctctacaagcaaatctccaacagcacatctggaggatcttcaaatgacaacgcctacttcggctacagcaccccctgggggtattttgacttcaacagattccactgccacttctcaccacgtgactggcagcgactcatcaacaacaactggggattccggcctaagcgactcaacttcaagctcttcaacattcaggtcaaagaggttacggacaacaatggagtcaagaccatcgccaataaccttaccagcacggtccaggtcttcacggactcagactatcagctcccgtacgtgctcgggtcggctcacgagggctgcctcccgccgttcccagcggacgttttcatgattcctcagtacgggtatctgacgcttaatgatggaagccaggccgtgggtcgttcgtccttttactgcctggaatatttcccgtcgcaaatgctaagaacgggtaacaacttccagttcagctacgagtttgagaacgtacctttccatagcagctacgctcacagccaaagcctggaccgactaatgaatccactcatcgaccaatacttgtactatctctcaaagactattaacggttctggacagaatcaacaaacgctaaaattcagtgtggccggacccagcaacatggctgtccagggaagaaactacatacctggacccagctaccgacaacaacgtgtctcaaccactgtgactcaaaacaacaacagcgaatttgcttggcctggagcttcttcttgggctctcaatggacgtaatagcttgatgaatcctggacctgctatggccagccacaaagaaggagaggaccgtttctttcctttgtctggatctttaatttttggcaaacaaggaactggaagagacaacgtggatgcggacaaagtcatgataaccaacgaagaagaaattaaaactactaacccggtagcaacggagtcctatggacaagtggcccggaaccaccagagtgcccaagcacaggcgcagaccggctgggttcaaaaccaaggaatacttccgggtatggtttggcaggacagagatgtgtacctgcaaggacccatttgggccaaaattcctcacacggacggcaactttcacccttctccgctgatgggagggtttggaatgaagcacccgcctcctcagatcctcatcaaaaacacacctgtacctgcggatcctccaacggccttcaacaaggacaagctgaactctttcatcacccagtattctactggccaagtcagcgtggagatcgagtgggagctgcagaaggaaaacagcaagcgctggaacccggagatccagtacacttccaactattacaagtctaataatgttgaatttgctgttaatactgaaggtgtatatagtgaaccccgccccattggcaccagatacctgactcgtaatctg

SEQ ID NO: 220 - protein, 736 aa, synthetic construct
  REGION 1..736: note = Adeno Associated Virus Capsid Protein Variant
MAADGYLPDWLEDNLSEGIREWWALKPGAPQPKANQQHQDNARGLVLPGYKYLGPGNGLDKGEPVNAADAAALEHDKAYDQQLKAGDNPYLKYNHADAEFQERLKEDTSFGGNLGRAVFQAKKRLLEPLGLVEEAAKTAPGKKRPVEQSPQEPDSSAGIGKSGAQPAKKRLNFGQTGDTESVPDPQPIGEPPAAPSGVGSLTMASGGGAPVADNNEGADGVGSSSGNWHCDSQWLGDRVITTSTRTWALPTYNNHLYKQISNSTSGGSSNDNAYFGYSTPWGYFDFNRFHCHFSPRDWQRLINNNWGFRPKRLNFKLFNIQVKEVTDNNGVKTIANNLTSTVQVFTDSDYQLPYVLGSAHEGCLPPFPADVFMIPQYGYLTLNDGSQAVGRSSFYCLEYFPSQMLRTGNNFQFSYEFENVPFHSSYAHSQSLDRLMNPLIDQYLYYLSKTINGSGQNQQTLKFSVAGPSNMAVQGRNYIPGPSYRQQRVSTTVTQNNNSEFAWPGASSWALNGRNSLMNPGPAMASHKEGEDRFFPLSGSLIFGKQGTGRDNVDADKVMITNEEEIKTTNPVATESYGQVARNHQSAQAQAQTGWVQNQGILPGMVWQDRDVYLQGPIWAKIPHTDGNFHPSPLMGGFGMKHPPPQILIKNTPVPADPPTAFNKDKLNSFITQYSTGQVSVEIEWELQKENSKRWNPEIQYTSNYYKSNNVEFAVNTEGVYSEPRPIGTRYLTRNL

SEQ ID NO: 221 - DNA, 2208 bp, synthetic construct
  misc_feature 1..2208: note = Adeno Associated Virus Capsid Protein Variant
  source 1..2208: mol_type = other DNA
atggctgccgatggttatcttccagattggctcgaggacaaccttagtgaaggaattcgcgagtggtgggctttgaaacctggagcccctcaacccaaggcaaatcaacaacatcaagacaacgctcgaggtcttgtgcttccgggttacaaataccttggacccggcaacggactcgacaagggggagccggtcaacgcagcagacgcggcggccctcgagcacgacaaggcctacgaccagcagctcaaggccggagacaacccgtacctcaagtacaaccacgccgacgccgagttccaggagcggctcaaagaagatacgtcttttgggggcaacctcgggcgagcagtcttccaggccaaaaagaggcttcttgaacctcttggtctggttgaggaagcggctaagacggctcctggaaagaagaggcctgtagagcagtctcctcaggaaccggactcctccgcgggtattggcaaatcgggtgcacagcccgctaaaaagagactcaatttcggtcagactggcgacacagagtcagtcccagaccctcaaccaatcggagaacctcccgcagccccctcaggtgtgggatctcttacaatggcttcaggtggtggcgcaccagtggcagacaataacgaaggtgccgatggagtgggtagttcctcgggaaattggcattgcgattcccaatggctgggggacagagtcatcaccaccagcacccgaacctgggccctgcccacctacaacaatcacctctacaagcaaatctccaacagcacatctggaggatcttcaaatgacaacgcctacttcggctacagcaccccctgggggtattttgacttcaacagattccactgccacttctcaccacgtgactggcagcgactcatcaacaacaactggggattccggcctaagcgactcaacttcaagctcttcaacattcaggtcaaagaggttacggacaacaatggagtcaagaccatcgccaataaccttaccagcacggtccaggtcttcacggactcagactatcagctcccgtacgtgctcgggtcggctcacgagggctgcctcccgccgttcccagcggacgttttcatgattcctcagtacgggtatctgacgcttaatgatggaagccaggccgtgggtcgttcgtccttttactgcctggaatatttcccgtcgcaaatgctaagaacgggtaacaacttccagttcagctacgagtttgagaacgtacctttccatagcagctacgctcacagccaaagcctggaccgactaatgaatccactcatcgaccaatacttgtactatctctcaaagactattaacggttctggacagaatcaacaaacgctaaaattcagtgtggccggacccagcaacatggctgtccagggaagaaactacatacctggacccagctaccgacaacaacgtgtctcaaccactgtgactcaaaacaacaacagcgaatttgcttggcctggagcttcttcttgggctctcaatggacgtaatagcttgatgaatcctggacctgctatggccagccacaaagaaggagaggaccgtttctttcctttgtctggatctttaatttttggcaaacaaggaactggaagagacaacgtggatgcggggaaagtcatgataaccaacgaagaagaaattaaaactactaacccggtagcaacggagtcctatggacaagtggccacaaaccaccagagtgcccaagcacaggcgcagaccggctgggttcaaaaccaaggaatacttccgggtatggtttggcaggacagagatgtgtacctgcaaggacccatttgggccaaaattcctcacacggacggcaactttcacccttctccgctgatgggagggtttggaatgaagcacccgcctcctcagatcctcatcaaaaacacacctgtacctgcggatcctccaacggccttcaacaaggacaagctgaactctttcatcacccagtattctactggccaagtcagcgtggagatcgagtgggagctgcagaaggaaaacagcaagcgctggaacccggagatccagtacacttccaactattacaagtctaataatgttgaatttgctgttaatactgaaggtgtatatagtgaaccccgccccattggcaccagatacctgactcgtaatctg

SEQ ID NO: 222 - protein, 736 aa, synthetic construct
  REGION 1..736: note = Adeno Associated Virus Capsid Protein Variant
MAADGYLPDWLEDNLSEGIREWWALKPGAPQPKANQQHQDNARGLVLPGYKYLGPGNGLDKGEPVNAADAAALEHDKAYDQQLKAGDNPYLKYNHADAEFQERLKEDTSFGGNLGRAVFQAKKRLLEPLGLVEEAAKTAPGKKRPVEQSPQEPDSSAGIGKSGAQPAKKRLNFGQTGDTESVPDPQPIGEPPAAPSGVGSLTMASGGGAPVADNNEGADGVGSSSGNWHCDSQWLGDRVITTSTRTWALPTYNNHLYKQISNSTSGGSSNDNAYFGYSTPWGYFDFNRFHCHFSPRDWQRLINNNWGFRPKRLNFKLFNIQVKEVTDNNGVKTIANNLTSTVQVFTDSDYQLPYVLGSAHEGCLPPFPADVFMIPQYGYLTLNDGSQAVGRSSFYCLEYFPSQMLRTGNNFQFSYEFENVPFHSSYAHSQSLDRLMNPLIDQYLYYLSKTINGSGQNQQTLKFSVAGPSNMAVQGRNYIPGPSYRQQRVSTTVTQNNNSEFAWPGASSWALNGRNSLMNPGPAMASHKEGEDRFFPLSGSLIFGKQGTGRDNVDAGKVMITNEEEIKTTNPVATESYGQVATNHQSAQAQAQTGWVQNQGILPGMVWQDRDVYLQGPIWAKIPHTDGNFHPSPLMGGFGMKHPPPQILIKNTPVPADPPTAFNKDKLNSFITQYSTGQVSVEIEWELQKENSKRWNPEIQYTSNYYKSNNVEFAVNTEGVYSEPRPIGTRYLTRNL

SEQ ID NO: 223 - DNA, 2208 bp, synthetic construct
  misc_feature 1..2208: note = Adeno Associated Virus Capsid Protein Variant
  source 1..2208: mol_type = other DNA
atggctgccgatggttatcttccagattggctcgaggacaaccttagtgaaggaattcgcgagtggtgggctttgaaacctggagcccctcaacccaaggcaaatcaacaacatcaagacaacgctcgaggtcttgtgcttccgggttacaaataccttggacccggcaacggactcgacaagggggagccggtcaacgcagcagacgcggcggccctcgagcacgacaaggcctacgaccagcagctcaaggccggagacaacccgtacctcaagtacaaccacgccgacgccgagttccaggagcggctcaaagaagatacgtcttttgggggcaacctcgggcgagcagtcttccaggccaaaaagaggcttcttgaacctcttggtctggttgaggaagcggctaagacggctcctggaaagaagaggcctgtagagcagtctcctcaggaaccggactcctccgcgggtattggcaaatcgggtgcacagcccgctaaaaagagactcaatttcggtcagactggcgacacagagtcagtcccagaccctcaaccaatcggagaacctcccgcagccccctcaggtgtgggatctcttacaatggcttcaggtggtggcgcaccagtggcagacaataacgaaggtgccgatggagtgggtagttcctcgggaaattggcattgcgattcccaatggctgggggacagagtcatcaccaccagcacccgaacctgggccctgcccacctacaacaatcacctctacaagcaaatctccaacagcacatctggaggatcttcaaatgacaacgcctacttcggctacagcaccccctgggggtattttgacttcaacagattccactgccacttctcaccacgtgactggcagcgactcatcaacaacaactggggattccggcctaagcgactcaacttcaagctcttcaacattcaggtcaaagaggttacggacaacaatggagtcaagaccatcgccaataaccttaccagcacggtccaggtcttcacggactcagactatcagctcccgtacgtgctcgggtcggctcacgagggctgcctcccgccgttcccagcggacgttttcatgattcctcagtacgggtatctgacgcttaatgatggaagccaggccgtgggtcgttcgtccttttactgcctggaatatttcccgtcgcaaatgctaagaacgggtaacaacttccagttcagctacgagtttgagaacgtacctttccatagcagctacgctcacagccaaagcctggaccgactaatgaatccactcatcgaccaatacttgtactatctctcaaagactattaacggttctggacagaatcaacaaacgctaaaattcagtgtggccggacccagcaacatggctgtccagggaagaaactacatacctggacccagctaccgacaacaacgtgtctcaaccactgtgactcaaaacaacaacagcgaatttgcttggcctggagcttcttcttgggctctcaatggacgtaatagcttgatgaatcctggacctgctatggccagccacaaagaaggagaggaccgtttctttcctttgtctggatctttaatttttggcaaacaaggagttggaagagacaacgtggatgcggacaaagtcatgataaccaacgaagaagaaattaaaactactaacccggtagcaacggagtcctatggacaagtggccacaaaccaccagagtgcccaagcacaggcgcagaccggctgggttcaaaaccaaggaatacttccgggtatggtttggcaggacagagatgtgtacctgcaaggacccatttgggccaaaattcctcacacggacggcaactttcacccttctccgctgatgggagggtttggaatgaagcacccgcctcctcagatcctcatcaaaaacacacctgtacctgcggatcctccaacggccttcaacaaggacaagctgaactctttcatcacccagtattctactggccaagtcagcgtggagatcgagtgggagctgcagaaggaaaacagcaagcgctggaacccggagatccagtacacttccaactattacaagtctaataatgttgaatttgctgttaatactgaaggtgtatatagtgaaccccgccccattggcaccagatacctgactcgtaatctg

SEQ ID NO: 224 - protein, 736 aa, synthetic construct
  REGION 1..736: note = Adeno Associated Virus Capsid Protein Variant
MAADGYLPDWLEDNLSEGIREWWALKPGAPQPKANQQHQDNARGLVLPGYKYLGPGNGLDKGEPVNAADAAALEHDKAYDQQLKAGDNPYLKYNHADAEFQERLKEDTSFGGNLGRAVFQAKKRLLEPLGLVEEAAKTAPGKKRPVEQSPQEPDSSAGIGKSGAQPAKKRLNFGQTGDTESVPDPQPIGEPPAAPSGVGSLTMASGGGAPVADNNEGADGVGSSSGNWHCDSQWLGDRVITTSTRTWALPTYNNHLYKQISNSTSGGSSNDNAYFGYSTPWGYFDFNRFHCHFSPRDWQRLINNNWGFRPKRLNFKLFNIQVKEVTDNNGVKTIANNLTSTVQVFTDSDYQLPYVLGSAHEGCLPPFPADVFMIPQYGYLTLNDGSQAVGRSSFYCLEYFPSQMLRTGNNFQFSYEFENVPFHSSYAHSQSLDRLMNPLIDQYLYYLSKTINGSGQNQQTLKFSVAGPSNMAVQGRNYIPGPSYRQQRVSTTVTQNNNSEFAWPGASSWALNGRNSLMNPGPAMASHKEGEDRFFPLSGSLIFGKQGVGRDNVDADKVMITNEEEIKTTNPVATESYGQVATNHQSAQAQAQTGWVQNQGILPGMVWQDRDVYLQGPIWAKIPHTDGNFHPSPLMGGFGMKHPPPQILIKNTPVPADPPTAFNKDKLNSFITQYSTGQVSVEIEWELQKENSKRWNPEIQYTSNYYKSNNVEFAVNTEGVYSEPRPIGTRYLTRNL

SEQ ID NO: 225 - DNA, 2208 bp, synthetic construct
  misc_feature 1..2208: note = Adeno Associated Virus Capsid Protein Variant
  source 1..2208: mol_type = other DNA
atggctgccgatggttatcttccagattggctcgaggacaaccttagtgaaggaattcgcgagtggtgggctttgaaacctggagcccctcaacccaaggcaaatcaacaacatcaagacaacgctcgaggtcttgtgcttccgggttacaaataccttggacccggcaacggactcgacaagggggagccggtcaacgcagcagacgcggcggccctcgagcacgacaaggcctacgaccagcagctcaaggccggagacaacccgtacctcaagtacaaccacgccgacgccgagttccaggagcggctcaaagaagatacgtcttttgggggcaacctcgggcgagcagtcttccaggccaaaaagaggcttcttgaacctcttggtctggttgaggaagcggctaagacggctcctggaaagaagaggcctgtagagcagtctcctcaggaaccggactcctccgcgggtattggcaaatcgggtgcacagcccgctaaaaagagactcaatttcggtcagactggcgacacagagtcagtcccagaccctcaaccaatcggagaacctcccgcagccccctcaggtgtgggatctcttacaatggcttcaggtggtggcgcaccagtggcagacaataacgaaggtgccgatggagtgggtagttcctcgggaaattggcattgcgattcccaatggctgggggacagagtcatcaccaccagcacccgaacctgggccctgcccacctacaacaatcacctctacaagcaaatctccaacagcacatctggaggatcttcaaatgacaacgcctacttcggctacagcaccccctgggggtattttgacttcaacagattccactgccacttctcaccacgtgactggcagcgactcatcaacaacaactggggattccggcctaagcgactcaacttcaagctcttcaacattcaggtcaaagaggttacggacaacaatggagtcaagaccatcgccaataaccttaccagcacggtccaggtcttcacggactcagactatcagctcccgtacgtgctcgggtcggctcacgagggctgcctcccgccgttcccagcggacgttttcatgattcctcagtacgggtatctgacgcttaatgatggaagccaggccgtgggtcgttcgtccttttactgcctggaatatttcccgtcgcaaatgctaagaacgggtaacaacttccagttcagctacgagtttgagaacgtacctttccatagcagctacgctcacagccaaagcctggaccgactaatgaatccactcatcgaccaatacttgtactatctctcaaagactattaacggttctggacagaatcaaatgacgctaaaattcagtgtggccggacccagcaacatggctgtccagggaagaaactacatacctggacccagctaccgacaacaacgtgtctcaaccactgtgactcaaaacaacaacagcgaatttgcttggcctggagcttcttcttgggctctcaatggacgtaatagcttgatgaatcctggacctgctatggccagccacaaagaaggagaggaccgtttctttcctttgtctggatctttaatttttggcaaacaaggaactggaagagacaacgtggatgcggacaaagtcatgataaccaacgaagaagaaattaaaactactaacccggtagcaacggagtcctatggacaagtggccacaaaccaccagagtgcccaagcacaggcgcagaccggctgggttcaaaaccaaggaatacttccgggtatggtttggcaggacagagatgtgtacctgcaaggacccatttgggccaaaattcctcacacggacggcaactttcacccttctccgctgatgggagggtttggaatgaagcacccgcctcctcagatcctcatcaaaaacacacctgtacctgcggatcctccaacggccttcaacaaggacaagctgaactctttcatcacccagtattctactggccaagtcagcgtggagatcgagtgggagctgcagaaggaaaacagcaagcgctggaacccggagatccagtacacttccaactattacaagtctaataatgttgaatttgctgttaatactgaaggtgtatatagtgaaccccgccccattggcaccagatacctgactcgtaatctg

SEQ ID NO: 226 - protein, 736 aa, synthetic construct
  REGION 1..736: note = Adeno Associated Virus Capsid Protein Variant
MAADGYLPDWLEDNLSEGIREWWALKPGAPQPKANQQHQDNARGLVLPGYKYLGPGNGLDKGEPVNAADAAALEHDKAYDQQLKAGDNPYLKYNHADAEFQERLKEDTSFGGNLGRAVFQAKKRLLEPLGLVEEAAKTAPGKKRPVEQSPQEPDSSAGIGKSGAQPAKKRLNFGQTGDTESVPDPQPIGEPPAAPSGVGSLTMASGGGAPVADNNEGADGVGSSSGNWHCDSQWLGDRVITTSTRTWALPTYNNHLYKQISNSTSGGSSNDNAYFGYSTPWGYFDFNRFHCHFSPRDWQRLINNNWGFRPKRLNFKLFNIQVKEVTDNNGVKTIANNLTSTVQVFTDSDYQLPYVLGSAHEGCLPPFPADVFMIPQYGYLTLNDGSQAVGRSSFYCLEYFPSQMLRTGNNFQFSYEFENVPFHSSYAHSQSLDRLMNPLIDQYLYYLSKTINGSGQNQMTLKFSVAGPSNMAVQGRNYIPGPSYRQQRVSTTVTQNNNSEFAWPGASSWALNGRNSLMNPGPAMASHKEGEDRFFPLSGSLIFGKQGTGRDNVDADKVMITNEEEIKTTNPVATESYGQVATNHQSAQAQAQTGWVQNQGILPGMVWQDRDVYLQGPIWAKIPHTDGNFHPSPLMGGFGMKHPPPQILIKNTPVPADPPTAFNKDKLNSFITQYSTGQVSVEIEWELQKENSKRWNPEIQYTSNYYKSNNVEFAVNTEGVYSEPRPIGTRYLTRNL

SEQ ID NO: 227 - DNA, 2208 bp, synthetic construct
  misc_feature 1..2208: note = Adeno Associated Virus Capsid Protein Variant
  source 1..2208: mol_type = other DNA
atggctgccgatggttatcttccagattggctcgaggacaaccttagtgaaggaattcgcgagtggtgggctttgaaacctggagcccctcaacccaaggcaaatcaacaacatcaagacaacgctcgaggtcttgtgcttccgggttacaaataccttggacccggcaacggactcgacaagggggagccggtcaacgcagcagacgcggcggccctcgagcacgacaaggcctacgaccagcagctcaaggccggagacaacccgtacctcaagtacaaccacgccgacgccgagttccaggagcggctcaaagaagatacgtcttttgggggcaacctcgggcgagcagtcttccaggccaaaaagaggcttcttgaacctcttggtctggttgaggaagcggctaagacggctcctggaaagaagaggcctgtagagcagtctcctcaggaaccggactcctccgcgggtattggcaaatcgggtgcacagcccgctaaaaagagactcaatttcggtcagactggcgacacagagtcagtcccagaccctcaaccaatcggagaacctcccgcagccccctcaggtgtgggatctcttacaatggcttcaggtggtggcgcaccagtggcagacaataacgaaggtgccgatggagtgggtagttcctcgggaaattggcattgcgattcccaatggctgggggacagagtcatcaccaccagcacccgaacctgggccctgcccacctacaacaatcacctctacaagcaaatctccaacagcacatctggaggatcttcaaatgacaacgcctacttcggctacagcaccccctgggggtattttgacttcaacagattccactgccacttctcaccacgtgactggcagcgactcatcaacaacaactggggattccggcctaagcgactcaacttcaagctcttcaacattcaggtcaaagaggttacggacaacaatggagtcaagaccatcgccaataaccttaccagcacggtccaggtcttcacggactcagactatcagctcccgtacgtgctcgggtcggctcacgagggctgcctcccgccgttcccagcggacgttttcatgattcctcagtacgggtatctgacgcttaatgatggaagccaggccgtgggtcgttcgtccttttactgcctggaatatttcccgtcgcaaatgctaagaacgggtaacaacttccagttcagctacgagtttgagaacgtacctttccatagcagctacgctcacagccaaagcctggaccgactaatgaatccactcatcgaccaatacttgtactatctctcaaagactattaaccagtctggacagaatcaacaaacgctaaaattcagtgtggccggacccagcaacatggctgtccagggaagaaactacatacctggacccagctaccgacaacaacgtgtctcaaccactgtgactcaaaacaacaacagcgaatttgcttggcctggagcttcttcttgggctctcaatggacgtaatagcttgatgaatcctggacctgctatggccagccacaaagaaggagaggaccgtttctttcctttgtctggatctttaatttttggcaaacaaggaactggaagagacaacgtggatgcggacaaagtcatgataaccaacgaagaagaaattaaaactactaacccggtagcaacggagtcctatggacaagtggccacaaaccaccagagtgcccaagcacaggcgcagaccggctgggttcaaaaccaaggaatacttccgggtatggtttggcaggacagagatgtgtacctgcaaggacccatttgggccaaaattcctcacacggacggcaactttcacccttctccgctgatgggagggtttggaatgaagcacccgcctcctcagatcctcatcaaaaacacacctgtacctgcggatcctccaacggccttcaacaaggacaagctgaactctttcatcacccagtattctactggccaagtcagcgtggagatcgagtgggagctgcagaaggaaaacagcaagcgctggaacccggagatccagtacacttccaactattacaagtctaataatgttgaatttgctgttaatactgaaggtgtatatagtgaaccccgccccattggcaccagatacctgactcgtaatctg

SEQ ID NO: 228 - protein, 736 aa, synthetic construct
  REGION 1..736: note = Adeno Associated Virus Capsid Protein Variant
MAADGYLPDWLEDNLSEGIREWWALKPGAPQPKANQQHQDNARGLVLPGYKYLGPGNGLDKGEPVNAADAAALEHDKAYDQQLKAGDNPYLKYNHADAEFQERLKEDTSFGGNLGRAVFQAKKRLLEPLGLVEEAAKTAPGKKRPVEQSPQEPDSSAGIGKSGAQPAKKRLNFGQTGDTESVPDPQPIGEPPAAPSGVGSLTMASGGGAPVADNNEGADGVGSSSGNWHCDSQWLGDRVITTSTRTWALPTYNNHLYKQISNSTSGGSSNDNAYFGYSTPWGYFDFNRFHCHFSPRDWQRLINNNWGFRPKRLNFKLFNIQVKEVTDNNGVKTIANNLTSTVQVFTDSDYQLPYVLGSAHEGCLPPFPADVFMIPQYGYLTLNDGSQAVGRSSFYCLEYFPSQMLRTGNNFQFSYEFENVPFHSSYAHSQSLDRLMNPLIDQYLYYLSKTINQSGQNQQTLKFSVAGPSNMAVQGRNYIPGPSYRQQRVSTTVTQNNNSEFAWPGASSWALNGRNSLMNPGPAMASHKEGEDRFFPLSGSLIFGKQGTGRDNVDADKVMITNEEEIKTTNPVATESYGQVATNHQSAQAQAQTGWVQNQGILPGMVWQDRDVYLQGPIWAKIPHTDGNFHPSPLMGGFGMKHPPPQILIKNTPVPADPPTAFNKDKLNSFITQYSTGQVSVEIEWELQKENSKRWNPEIQYTSNYYKSNNVEFAVNTEGVYSEPRPIGTRYLTRNL

SEQ ID NO: 229 - DNA, 2208 bp, synthetic construct
  misc_feature 1..2208: note = Adeno Associated Virus Capsid Protein Variant
  source 1..2208: mol_type = other DNA
atggctgccgatggttatcttccagattggctcgaggacaaccttagtgaaggaattcgcgagtggtgggctttgaaacctggagcccctcaacccaaggcaaatcaacaacatcaagacaacgctcgaggtcttgtgcttccgggttacaaataccttggacccggcaacggactcgacaagggggagccggtcaacgcagcagacgcggcggccctcgagcacgacaaggcctacgaccagcagctcaaggccggagacaacccgtacctcaagtacaaccacgccgacgccgagttccaggagcggctcaaagaagatacgtcttttgggggcaacctcgggcgagcagtcttccaggccaaaaagaggcttcttgaacctcttggtctggttgaggaagcggctaagacggctcctggaaagaagaggcctgtagagcagtctcctcaggaaccggactcctccgcgggtattggcaaatcgggtgcacagcccgctaaaaagagactcaatttcggtcagactggcgacacagagtcagtcccagaccctcaaccaatcggagaacctcccgcagccccctcaggtgtgggatctcttacaatggcttcaggtggtggcgcaccagtggcagacaataacgaaggtgccgatggagtgggtagttcctcgggaaattggcattgcgattcccaatggctgggggacagagtcatcaccaccagcacccgaacctgggccctgcccacctacaacaatcacctctacaagcaaatctccaacagcacatctggaggatcttcaaatgacaacgcctacttcggctacagcaccccctgggggtattttgacttcaacagattccactgccacttctcaccacgtgactggcagcgactcatcaacaacaactggggattccggcctaagcgactcaacttcaagctcttcaacattcaggtcaaagaggttacggacaacaatggagtcaagaccatcgccaataaccttaccagcacggtccaggtcttcacggactcagactatcagctcccgtacgtgctcgggtcggctcacgagggctgcctcccgccgttcccagcggacgttttcatgattcctcagtacgggtatctgacgcttaatgatggaagccaggccgtgggtcgttcgtccttttactgcctggaatatttcccgtcgcaaatgctaagaacgggtaacaacttccagttcagctacgagtttgagaacgtacctttccatagcagctacgctcacagccaaagcctggaccgactaatgaatccactcatcgaccaatacttgtactatctctcaaagactattaacggttctggacagaatcaacaagctctaaaattcagtgtggccggacccagcaacatggctgtccagggaagaaactacatacctggacccagctaccgacaacaacgtgtctcaaccactgtgactcaaaacaacaacagcgaatttgcttggcctggagcttcttcttgggctctcaatggacgtaatagcttgatgaatcctggacctgctatggccagccacaaagaaggagaggaccgtttctttcctttgtctggatctttaatttttggcaaacaaggaactggaagagacaacgtggatgcggacaaagtcatgataaccaacgaagaagaaattaaaactactaacccggtagcaacggagtcctatggacaagtggccacaaaccaccagagtgcccaagcacaggcgcagaccggctgggttcaaaaccaaggaatacttccgggtatggtttggcaggacagagatgtgtacctgcaaggacccatttgggccaaaattcctcacacggacggcaactttcacccttctccgctgatgggagggtttggaatgaagcacccgcctcctcagatcctcatcaaaaacacacctgtacctgcggatcctccaacggccttcaacaaggacaagctgaactctttcatcacccagtattctactggccaagtcagcgtggagatcgagtgggagctgcagaaggaaaacagcaagcgctggaacccggagatccagtacacttccaactattacaagtctaataatgttgaatttgctgttaatactgaaggtgtatatagtgaaccccgccccattggcaccagatacctgactcgtaatctg

SEQ ID NO: 230 - protein, 736 aa, synthetic construct
  REGION 1..736: note = Adeno Associated Virus Capsid Protein Variant
MAADGYLPDWLEDNLSEGIREWWALKPGAPQPKANQQHQDNARGLVLPGYKYLGPGNGLDKGEPVNAADAAALEHDKAYDQQLKAGDNPYLKYNHADAEFQERLKEDTSFGGNLGRAVFQAKKRLLEPLGLVEEAAKTAPGKKRPVEQSPQEPDSSAGIGKSGAQPAKKRLNFGQTGDTESVPDPQPIGEPPAAPSGVGSLTMASGGGAPVADNNEGADGVGSSSGNWHCDSQWLGDRVITTSTRTWALPTYNNHLYKQISNSTSGGSSNDNAYFGYSTPWGYFDFNRFHCHFSPRDWQRLINNNWGFRPKRLNFKLFNIQVKEVTDNNGVKTIANNLTSTVQVFTDSDYQLPYVLGSAHEGCLPPFPADVFMIPQYGYLTLNDGSQAVGRSSFYCLEYFPSQMLRTGNNFQFSYEFENVPFHSSYAHSQSLDRLMNPLIDQYLYYLSKTINGSGQNQQALKFSVAGPSNMAVQGRNYIPGPSYRQQRVSTTVTQNNNSEFAWPGASSWALNGRNSLMNPGPAMASHKEGEDRFFPLSGSLIFGKQGTGRDNVDADKVMITNEEEIKTTNPVATESYGQVATNHQSAQAQAQTGWVQNQGILPGMVWQDRDVYLQGPIWAKIPHTDGNFHPSPLMGGFGMKHPPPQILIKNTPVPADPPTAFNKDKLNSFITQYSTGQVSVEIEWELQKENSKRWNPEIQYTSNYYKSNNVEFAVNTEGVYSEPRPIGTRYLTRNL

SEQ ID NO: 231 - DNA, 2208 bp, synthetic construct
  misc_feature 1..2208: note = Adeno Associated Virus Capsid Protein Variant
  source 1..2208: mol_type = other DNA
atggctgccgatggttatcttccagattggctcgaggacaaccttagtgaaggaattcgcgagtggtgggctttgaaacctggagcccctcaacccaaggcaaatcaacaacatcaagacaacgctcgaggtcttgtgcttccgggttacaaataccttggacccggcaacggactcgacaagggggagccggtcaacgcagcagacgcggcggccctcgagcacgacaaggcctacgaccagcagctcaaggccggagacaacccgtacctcaagtacaaccacgccgacgccgagttccaggagcggctcaaagaagatacgtcttttgggggcaacctcgggcgagcagtcttccaggccaaaaagaggcttcttgaacctcttggtctggttgaggaagcggctaagacggctcctggaaagaagaggcctgtagagcagtctcctcaggaaccggactcctccgcgggtattggcaaatcgggtgcacagcccgctaaaaagagactcaatttcggtcagactggcgacacagagtcagtcccagaccctcaaccaatcggagaacctcccgcagccccctcaggtgtgggatctcttacaatggcttcaggtggtggcgcaccagtggcagacaataacgaaggtgccgatggagtgggtagttcctcgggaaattggcattgcgattcccaatggctgggggacagagtcatcaccaccagcacccgaacctgggccctgcccacctacaacaatcacctctacaagcaaatctccaacagcacatctggaggatcttcaaatgacaacgcctacttcggctacagcaccccctgggggtattttgacttcaacagattccactgccacttctcaccacgtgactggcagcgactcatcaacaacaactggggattccggcctaagcgactcaacttcaagctcttcaacattcaggtcaaagaggttacggacaacaatggagtcaagaccatcgccaataaccttaccagcacggtccaggtcttcacggactcagactatcagctcccgtacgtgctcgggtcggctcacgagggctgcctcccgccgttcccagcggacgttttcatgattcctcagtacgggtatctgacgcttaatgatggaagccaggccgtgggtcgttcgtccttttactgcctggaatatttcccgtcgcaaatgctaagaacgggtaacaacttccagttcagctacgagtttgagaacgtacctttccatagcagctacgctcacagccaaagcctggaccgactaatgaatccactcatcgaccaatacttgtactatctctcaaagactattaacggttctggacagaatcaacaaacgctaaaattcagtgtggccggacccagcaacatggctgtccagggaagaaactacatacctggacccagctaccgacaacaacgtgtctcaaccactgtgactcaaaacaacaacagcgaatttgcttggcctggagcttcttcttgggctctcaatggacgtaatagcttgatgaatcctggacctgctatggccagccacaaagaaggagaggaccgtttctttcctttgtctggatctttaatttttggcaaacaaggaactggaagagacaacgtggatgcggacaaagtcatgataaccaacgaagaagaaattaaaactactaacccggtagcaacggagtcctatggacaagtggccacaaaccaccagggggcccaagcacaggcgcagaccggctgggttcaaaaccaaggaatacttccgggtatggtttggcaggacagagatgtgtacctgcaaggacccatttgggccaaaattcctcacacggacggcaactttcacccttctccgctgatgggagggtttggaatgaagcacccgcctcctcagatcctcatcaaaaacacacctgtacctgcggatcctccaacggccttcaacaaggacaagctgaactctttcatcacccagtattctactggccaagtcagcgtggagatcgagtgggagctgcagaaggaaaacagcaagcgctggaacccggagatccagtacacttccaactattacaagtctaataatgttgaatttgctgttaatactgaaggtgtatatagtgaaccccgccccattggcaccagatacctgactcgtaatctg

SEQ ID NO: 232 - protein, 736 aa, synthetic construct
  REGION 1..736: note = Adeno Associated Virus Capsid Protein Variant
MAADGYLPDWLEDNLSEGIREWWALKPGAPQPKANQQHQDNARGLVLPGYKYLGPGNGLDKGEPVNAADAAALEHDKAYDQQLKAGDNPYLKYNHADAEFQERLKEDTSFGGNLGRAVFQAKKRLLEPLGLVEEAAKTAPGKKRPVEQSPQEPDSSAGIGKSGAQPAKKRLNFGQTGDTESVPDPQPIGEPPAAPSGVGSLTMASGGGAPVADNNEGADGVGSSSGNWHCDSQWLGDRVITTSTRTWALPTYNNHLYKQISNSTSGGSSNDNAYFGYSTPWGYFDFNRFHCHFSPRDWQRLINNNWGFRPKRLNFKLFNIQVKEVTDNNGVKTIANNLTSTVQVFTDSDYQLPYVLGSAHEGCLPPFPADVFMIPQYGYLTLNDGSQAVGRSSFYCLEYFPSQMLRTGNNFQFSYEFENVPFHSSYAHSQSLDRLMNPLIDQYLYYLSKTINGSGQNQQTLKFSVAGPSNMAVQGRNYIPGPSYRQQRVSTTVTQNNNSEFAWPGASSWALNGRNSLMNPGPAMASHKEGEDRFFPLSGSLIFGKQGTGRDNVDADKVMITNEEEIKTTNPVATESYGQVATNHQGAQAQAQTGWVQNQGILPGMVWQDRDVYLQGPIWAKIPHTDGNFHPSPLMGGFGMKHPPPQILIKNTPVPADPPTAFNKDKLNSFITQYSTGQVSVEIEWELQKENSKRWNPEIQYTSNYYKSNNVEFAVNTEGVYSEPRPIGTRYLTRNL

SEQ ID NO: 233 - DNA, 2208 bp, synthetic construct
  misc_feature 1..2208: note = Adeno Associated Virus Capsid Protein Variant
  source 1..2208: mol_type = other DNA
atggctgccgatggttatcttccagattggctcgaggacaaccttagtgaaggaattcgcgagtggtgggctttgaaacctggagcccctcaacccaaggcaaatcaacaacatcaagacaacgctcgaggtcttgtgcttccgggttacaaataccttggacccggcaacggactcgacaagggggagccggtcaacgcagcagacgcggcggccctcgagcacgacaaggcctacgaccagcagctcaaggccggagacaacccgtacctcaagtacaaccacgccgacgccgagttccaggagcggctcaaagaagatacgtcttttgggggcaacctcgggcgagcagtcttccaggccaaaaagaggcttcttgaacctcttggtctggttgaggaagcggctaagacggctcctggaaagaagaggcctgtagagcagtctcctcaggaaccggactcctccgcgggtattggcaaatcgggtgcacagcccgctaaaaagagactcaatttcggtcagactggcgacacagagtcagtcccagaccctcaaccaatcggagaacctcccgcagccccctcaggtgtgggatctcttacaatggcttcaggtggtggcgcaccagtggcagacaataacgaaggtgccgatggagtgggtagttcctcgggaaattggcattgcgattcccaatggctgggggacagagtcatcaccaccagcacccgaacctgggccctgcccacctacaacaatcacctctacaagcaaatctccaacagcacatctggaggatcttcaaatgacaacgcctacttcggctacagcaccccctgggggtattttgacttcaacagattccactgccacttctcaccacgtgactggcagcgactcatcaacaacaactggggattccggcctaagcgactcaacttcaagctcttcaacattcaggtcaaagaggttacggacaacaatggagtcaagaccatcgccaataaccttaccagcacggtccaggtcttcacggactcagactatcagctcccgtacgtgctcgggtcggctcacgagggctgcctcccgccgttcccagcggacgttttcatgattcctcagtacgggtatctgacgcttaatgatggaagccaggccgtgggtcgttcgtccttttactgcctggaatatttcccgtcgcaaatgctaagaacgggtaacaacttccagttcagctacgagtttgagaacgtacctttccatagcagctacgctcacagccaaagcctggaccgactaatgaatccactcatcgaccaatacttgtactatctctcaaagactattaacggttctggacagaatcaacaaacgctaaaattcagtgtggccggacccagcaacatggctgtccagggaagaaactacatacctggacccagctaccgacaacaacgtgtctcaaccactgtgactcaaaacaacaacagcgaatttgcttggcctggagcttcttcttgggctctcaatggacgtaatagcttgatgaatcctggacctgctatggccagccacaaagaaggagaggaccgtttctttcctttgtctggatctttaatttttggcaaacaaggaactggaagagacaacgtggatgcggacaaagtcatgataaccaacgaagaagaaattaaaactactaacccggtagcaacggagtcctatggacaagtggccacaaaccaccagagtgccctggcacaggcgcagaccggctgggttcaaaaccaaggaatacttccgggtatggtttggcaggacagagatgtgtacctgcaaggacccatttgggccaaaattcctcacacggacggcaactttcacccttctccgctgatgggagggtttggaatgaagcacccgcctcctcagatcctcatcaaaaacacacctgtacctgcggatcctccaacggccttcaacaaggacaagctgaactctttcatcacccagtattctactggccaagtcagcgtggagatcgagtgggagctgcagaaggaaaacagcaagcgctggaacccggagatccagtacacttccaactattacaagtctaataatgttgaatttgctgttaatactgaaggtgtatatagtgaaccccgccccattggcaccagatacctgactcgtaatctg

SEQ ID NO: 234 - protein, 736 aa, synthetic construct
  REGION 1..736: note = Adeno Associated Virus Capsid Protein Variant
MAADGYLPDWLEDNLSEGIREWWALKPGAPQPKANQQHQDNARGLVLPGYKYLGPGNGLDKGEPVNAADAAALEHDKAYDQQLKAGDNPYLKYNHADAEFQERLKEDTSFGGNLGRAVFQAKKRLLEPLGLVEEAAKTAPGKKRPVEQSPQEPDSSAGIGKSGAQPAKKRLNFGQTGDTESVPDPQPIGEPPAAPSGVGSLTMASGGGAPVADNNEGADGVGSSSGNWHCDSQWLGDRVITTSTRTWALPTYNNHLYKQISNSTSGGSSNDNAYFGYSTPWGYFDFNRFHCHFSPRDWQRLINNNWGFRPKRLNFKLFNIQVKEVTDNNGVKTIANNLTSTVQVFTDSDYQLPYVLGSAHEGCLPPFPADVFMIPQYGYLTLNDGSQAVGRSSFYCLEYFPSQMLRTGNNFQFSYEFENVPFHSSYAHSQSLDRLMNPLIDQYLYYLSKTINGSGQNQQTLKFSVAGPSNMAVQGRNYIPGPSYRQQRVSTTVTQNNNSEFAWPGASSWALNGRNSLMNPGPAMASHKEGEDRFFPLSGSLIFGKQGTGRDNVDADKVMITNEEEIKTTNPVATESYGQVATNHQSALAQAQTGWVQNQGILPGMVWQDRDVYLQGPIWAKIPHTDGNFHPSPLMGGFGMKHPPPQILIKNTPVPADPPTAFNKDKLNSFITQYSTGQVSVEIEWELQKENSKRWNPEIQYTSNYYKSNNVEFAVNTEGVYSEPRPIGTRYLTRNL

SEQ ID NO: 235 - DNA, 2208 bp, synthetic construct
  misc_feature 1..2208: note = Adeno Associated Virus Capsid Protein Variant
  source 1..2208: mol_type = other DNA
atggctgccgatggttatcttccagattggctcgaggacaaccttagtgaaggaattcgcgagtggtgggctttgaaacctggagcccctcaacccaaggcaaatcaacaacatcaagacaacgctcgaggtcttgtgcttccgggttacaaataccttggacccggcaacggactcgacaagggggagccggtcaacgcagcagacgcggcggccctcgagcacgacaaggcctacgaccagcagctcaaggccggagacaacccgtacctcaagtacaaccacgccgacgccgagttccaggagcggctcaaagaagatacgtcttttgggggcaacctcgggcgagcagtcttccaggccaaaaagaggcttcttgaacctcttggtctggttgaggaagcggctaagacggctcctggaaagaagaggcctgtagagcagtctcctcaggaaccggactcctccgcgggtattggcaaatcgggtgcacagcccgctaaaaagagactcaatttcggtcagactggcgacacagagtcagtcccagaccctcaaccaatcggagaacctcccgcagccccctcaggtgtgggatctcttacaatggcttcaggtggtggcgcaccagtggcagacaataacgaaggtgccgatggagtgggtagttcctcgggaaattggcattgcgattcccaatggctgggggacagagtcatcaccaccagcacccgaacctgggccctgcccacctacaacaatcacctctacaagcaaatctccaacagcacatctggaggatcttcaaatgacaacgcctacttcggctacagcaccccctgggggtattttgacttcaacagattccactgccacttctcaccacgtgactggcagcgactcatcaacaacaactggggattccggcctaagcgactcaacttcaagctcttcaacattcaggtcaaagaggttacggacaacaatggagtcaagaccatcgccaataaccttaccagcacggtccaggtcttcacggactcagactatcagctcccgtacgtgctcgggtcggctcacgagggctgcctcccgccgttcccagcggacgttttcatgattcctcagtacgggtatctgacgcttaatgatggaagccaggccgtgggtcgttcgtccttttactgcctggaatatttcccgtcgcaaatgctaagaacgggtaacaacttccagttcagctacgagtttgagaacgtacctttccatagcagctacgctcacagccaaagcctggaccgactaatgaatccactcatcgaccaatacttgtactatctctcaaagactattaacggttctggacagaatcaacaaacgctaaaattcagtgtggccggacccagcaacatggctgtccagggaagaaactacatacctggacccagctaccgacaacaacgtgtctcaaccactgtgactcaaaacaacaacagcgaatttgcttggcctggagcttcttcttgggctctcaatggacgtaatagcttgatgaatcctggacctgctatggccagccacaaagaaggagagacgcgtttctttcctttgtctggatctttaatttttggcaaacaaggaactggaagagacaacgtggatgcggacaaagtcatgataaccaacgaagaagaaattaaaactactaacccggtagcaacggagtcctatggacaagtggccacaaaccaccagagtgcccaagcacaggcgcagaccggctgggttcaaaaccaaggaatacttccgggtatggtttggcaggacagagatgtgtacctgcaaggacccatttgggccaaaattcctcacacggacggcaactttcacccttctccgctgatgggagggtttggaatgaagcacccgcctcctcagatcctcatcaaaaacacacctgtacctgcggatcctccaacggccttcaacaaggacaagctgaactctttcatcacccagtattctactggccaagtcagcgtggagatcgagtgggagctgcagaaggaaaacagcaagcgctggaacccggagatccagtacacttccaactattacaagtctaataatgttgaatttgctgttaatactgaaggtgtatatagtgaaccccgccccattggcaccagatacctgactcgtaatctg

SEQ ID NO: 236 - protein, 736 aa, synthetic construct
  REGION 1..736: note = Adeno Associated Virus Capsid Protein Variant
MAADGYLPDWLEDNLSEGIREWWALKPGAPQPKANQQHQDNARGLVLPGYKYLGPGNGLDKGEPVNAADAAALEHDKAYDQQLKAGDNPYLKYNHADAEFQERLKEDTSFGGNLGRAVFQAKKRLLEPLGLVEEAAKTAPGKKRPVEQSPQEPDSSAGIGKSGAQPAKKRLNFGQTGDTESVPDPQPIGEPPAAPSGVGSLTMASGGGAPVADNNEGADGVGSSSGNWHCDSQWLGDRVITTSTRTWALPTYNNHLYKQISNSTSGGSSNDNAYFGYSTPWGYFDFNRFHCHFSPRDWQRLINNNWGFRPKRLNFKLFNIQVKEVTDNNGVKTIANNLTSTVQVFTDSDYQLPYVLGSAHEGCLPPFPADVFMIPQYGYLTLNDGSQAVGRSSFYCLEYFPSQMLRTGNNFQFSYEFENVPFHSSYAHSQSLDRLMNPLIDQYLYYLSKTINGSGQNQQTLKFSVAGPSNMAVQGRNYIPGPSYRQQRVSTTVTQNNNSEFAWPGASSWALNGRNSLMNPGPAMASHKEGETRFFPLSGSLIFGKQGTGRDNVDADKVMITNEEEIKTTNPVATESYGQVATNHQSAQAQAQTGWVQNQGILPGMVWQDRDVYLQGPIWAKIPHTDGNFHPSPLMGGFGMKHPPPQILIKNTPVPADPPTAFNKDKLNSFITQYSTGQVSVEIEWELQKENSKRWNPEIQYTSNYYKSNNVEFAVNTEGVYSEPRPIGTRYLTRNL

SEQ ID NO: 237 - DNA, 2208 bp, synthetic construct
  misc_feature 1..2208: note = Adeno Associated Virus Capsid Protein Variant
  source 1..2208: mol_type = other DNA
atggctgccgatggttatcttccagattggctcgaggacaaccttagtgaaggaattcgcgagtggtgggctttgaaacctggagcccctcaacccaaggcaaatcaacaacatcaagacaacgctcgaggtcttgtgcttccgggttacaaataccttggacccggcaacggactcgacaagggggagccggtcaacgcagcagacgcggcggccctcgagcacgacaaggcctacgaccagcagctcaaggccggagacaacccgtacctcaagtacaaccacgccgacgccgagttccaggagcggctcaaagaagatacgtcttttgggggcaacctcgggcgagcagtcttccaggccaaaaagaggcttcttgaacctcttggtctggttgaggaagcggctaagacggctcctggaaagaagaggcctgtagagcagtctcctcaggaaccggactcctccgcgggtattggcaaatcgggtgcacagcccgctaaaaagagactcaatttcggtcagactggcgacacagagtcagtcccagaccctcaaccaatcggagaacctcccgcagccccctcaggtgtgggatctcttacaatggcttcaggtggtggcgcaccagtggcagacaataacgaaggtgccgatggagtgggtagttcctcgggaaattggcattgcgattcccaatggctgggggacagagtcatcaccaccagcacccgaacctgggccctgcccacctacaacaatcacctctacaagcaaatctccaacagcacatctggaggatcttcaaatgacaacgcctacttcggctacagcaccccctgggggtattttgacttcaacagattccactgccacttctcaccacgtgactggcagcgactcatcaacaacaactggggattccggcctaagcgactcaacttcaagctcttcaacattcaggtcaaagaggttacggacaacaatggagtcaagaccatcgccaataaccttaccagcacggtccaggtcttcacggactcagactatcagctcccgtacgtgctcgggtcggctcacgagggctgcctcccgccgttcccagcggacgttttcatgattcctcagtacgggtatctgacgcttaatgatggaagccaggccgtgggtcgttcgtccttttactgcctggaatatttcccgtcgcaaatgctaagaacgggtaacaacttccagttcagctacgagtttgagaacgtacctttccatagcagctacgctcacagccaaagcctggaccgactaatgaatccactcatcgaccaatacttgtactatctctcaaagactattaacggttctggacagaatcaacaaacgctaaaattcagtgtggccggacccagcaacatggctgtccagggaagaaactacatacctggacccagctaccgacaacaacgtgtctcaaccactgtgactcaaaacaacaacagcgaatttgcttggcctggagcttcttcttgggctctcaatggacgtaatagcttgatgaatcctggacctgctatggccagccacaaagaaggagaggaccgtttctttcctttgtctggatctttaatttttggcaaacaaggaactggaagagacaacgtggatgcggacaaagtcatgataaccaacgaagaagaaattaaaactactaacccggtagcaacggagtcctatggacaagtggccacaaaccaccagagtgcccaagcacaggcgtataccggctgggttcaaaaccaaggaatacttccgggtatggtttggcaggacagagatgtgtacctgcaaggacccatttgggccaaaattcctcacacggacggcaactttcacccttctccgctgatgggagggtttggaatgaagcacccgcctcctcagatcctcatcaaaaacacacctgtacctgcggatcctccaacggccttcaacaaggacaagctgaactctttcatcacccagtattctactggccaagtcagcgtggagatcgagtgggagctgcagaaggaaaacagcaagcgctggaacccggagatccagtacacttccaactattacaagtctaataatgttgaatttgctgttaatactgaaggtgtatatagtgaaccccgccccattggcaccagatacctgactcgtaatctg

SEQ ID NO: 238 - protein, 736 aa, synthetic construct
  REGION 1..736: note = Adeno Associated Virus Capsid Protein Variant
MAADGYLPDWLEDNLSEGIREWWALKPGAPQPKANQQHQDNARGLVLPGYKYLGPGNGLDKGEPVNAADAAALEHDKAYDQQLKAGDNPYLKYNHADAEFQERLKEDTSFGGNLGRAVFQAKKRLLEPLGLVEEAAKTAPGKKRPVEQSPQEPDSSAGIGKSGAQPAKKRLNFGQTGDTESVPDPQPIGEPPAAPSGVGSLTMASGGGAPVADNNEGADGVGSSSGNWHCDSQWLGDRVITTSTRTWALPTYNNHLYKQISNSTSGGSSNDNAYFGYSTPWGYFDFNRFHCHFSPRDWQRLINNNWGFRPKRLNFKLFNIQVKEVTDNNGVKTIANNLTSTVQVFTDSDYQLPYVLGSAHEGCLPPFPADVFMIPQYGYLTLNDGSQAVGRSSFYCLEYFPSQMLRTGNNFQFSYEFENVPFHSSYAHSQSLDRLMNPLIDQYLYYLSKTINGSGQNQQTLKFSVAGPSNMAVQGRNYIPGPSYRQQRVSTTVTQNNNSEFAWPGASSWALNGRNSLMNPGPAMASHKEGEDRFFPLSGSLIFGKQGTGRDNVDADKVMITNEEEIKTTNPVATESYGQVATNHQSAQAQAYTGWVQNQGILPGMVWQDRDVYLQGPIWAKIPHTDGNFHPSPLMGGFGMKHPPPQILIKNTPVPADPPTAFNKDKLNSFITQYSTGQVSVEIEWELQKENSKRWNPEIQYTSNYYKSNNVEFAVNTEGVYSEPRPIGTRYLTRNL

SEQ ID NO: 239 - DNA, 2208 bp, synthetic construct
  misc_feature 1..2208: note = Adeno Associated Virus Capsid Protein Variant
  source 1..2208: mol_type = other DNA
atggctgccgatggttatcttccagattggctcgaggacaaccttagtgaaggaattcgcgagtggtgggctttgaaacctggagcccctcaacccaaggcaaatcaacaacatcaagacaacgctcgaggtcttgtgcttccgggttacaaataccttggacccggcaacggactcgacaagggggagccggtcaacgcagcagacgcggcggccctcgagcacgacaaggcctacgaccagcagctcaaggccggagacaacccgtacctcaagtacaaccacgccgacgccgagttccaggagcggctcaaagaagatacgtcttttgggggcaacctcgggcgagcagtcttccaggccaaaaagaggcttcttgaacctcttggtctggttgaggaagcggctaagacggctcctggaaagaagaggcctgtagagcagtctcctcaggaaccggactcctccgcgggtattggcaaatcgggtgcacagcccgctaaaaagagactcaatttcggtcagactggcgacacagagtcagtcccagaccctcaaccaatcggagaacctcccgcagccccctcaggtgtgggatctcttacaatggcttcaggtggtggcgcaccagtggcagacaataacgaaggtgccgatggagtgggtagttcctcgggaaattggcattgcgattcccaatggctgggggacagagtcatcaccaccagcacccgaacctgggccctgcccacctacaacaatcacctctacaagcaaatctccaacagcacatctggaggatcttcaaatgacaacgcctacttcggctacagcaccccctgggggtattttgacttcaacagattccactgccacttctcaccacgtgactggcagcgactcatcaacaacaactggggattccggcctaagcgactcaacttcaagctcttcaacattcaggtcaaagaggttacggacaacaatggagtcaagaccatcgccaataaccttaccagcacggtccaggtcttcacggactcagactatcagctcccgtacgtgctcgggtcggctcacgagggctgcctcccgccgttcccagcggacgttttcatgattcctcagtacgggtatctgacgcttaatgatggaagccaggccgtgggtcgttcgtccttttactgcctggaatatttcccgtcgcaaatgctaagaacgggtaacaacttccagttcagctacgagtttgagaacgtacctttccatagcagctacgctcacagccaaagcctggaccgactaatgaatccactcatcgaccaatacttgtactatctctcaaagactattaacggttctggacagacgcaacaaacgctaaaattcagtgtggccggacccagcaacatggctgtccagggaagaaactacatacctggacccagctaccgacaacaacgtgtctcaaccactgtgactcaaaacaacaacagcgaatttgcttggcctggagcttcttcttgggctctcaatggacgtaatagcttgatgaatcctggacctgctatggccagccacaaagaaggagaggaccgtttctttcctttgtctggatctttaatttttggcaaacaaggaactggaagagacaacgtggatgcggacaaagtcatgataaccaacgaagaagaaattaaaactactaacccggtagcaacggagtcctatggacaagtggccacaaaccaccagagtgcccaagcacaggcgcagaccggctgggttcaaaaccaaggaatacttccgggtatggtttggcaggacagagatgtgtacctgcaaggacccatttgggccaaaattcctcacacggacggcaactttcacccttctccgctgatgggagggtttggaatgaagcacccgcctcctcagatcctcatcaaaaacacacctgtacctgcggatcctccaacggccttcaacaaggacaagctgaactctttcatcacccagtattctactggccaagtcagcgtggagatcgagtgggagctgcagaaggaaaacagcaagcgctggaacccggagatccagtacacttccaactattacaagtctaataatgttgaatttgctgttaatactgaaggtgtatatagtgaaccccgccccattggcaccagatacctgactcgtaatctg

SEQ ID NO: 240 - protein, 736 aa, synthetic construct
  REGION 1..736: note = Adeno Associated Virus Capsid Protein Variant
MAADGYLPDWLEDNLSEGIREWWALKPGAPQPKANQQHQDNARGLVLPGYKYLGPGNGLDKGEPVNAADAAALEHDKAYDQQLKAGDNPYLKYNHADAEFQERLKEDTSFGGNLGRAVFQAKKRLLEPLGLVEEAAKTAPGKKRPVEQSPQEPDSSAGIGKSGAQPAKKRLNFGQTGDTESVPDPQPIGEPPAAPSGVGSLTMASGGGAPVADNNEGADGVGSSSGNWHCDSQWLGDRVITTSTRTWALPTYNNHLYKQISNSTSGGSSNDNAYFGYSTPWGYFDFNRFHCHFSPRDWQRLINNNWGFRPKRLNFKLFNIQVKEVTDNNGVKTIANNLTSTVQVFTDSDYQLPYVLGSAHEGCLPPFPADVFMIPQYGYLTLNDGSQAVGRSSFYCLEYFPSQMLRTGNNFQFSYEFENVPFHSSYAHSQSLDRLMNPLIDQYLYYLSKTINGSGQTQQTLKFSVAGPSNMAVQGRNYIPGPSYRQQRVSTTVTQNNNSEFAWPGASSWALNGRNSLMNPGPAMASHKEGEDRFFPLSGSLIFGKQGTGRDNVDADKVMITNEEEIKTTNPVATESYGQVATNHQSAQAQAQTGWVQNQGILPGMVWQDRDVYLQGPIWAKIPHTDGNFHPSPLMGGFGMKHPPPQILIKNTPVPADPPTAFNKDKLNSFITQYSTGQVSVEIEWELQKENSKRWNPEIQYTSNYYKSNNVEFAVNTEGVYSEPRPIGTRYLTRNL

SEQ ID NO: 241 - DNA, 2208 bp, synthetic construct
  misc_feature 1..2208: note = Adeno Associated Virus Capsid Protein Variant
  source 1..2208: mol_type = other DNA
atggctgccgatggttatcttccagattggctcgaggacaaccttagtgaaggaattcgcgagtggtgggctttgaaacctggagcccctcaacccaaggcaaatcaacaacatcaagacaacgctcgaggtcttgtgcttccgggttacaaataccttggacccggcaacggactcgacaagggggagccggtcaacgcagcagacgcggcggccctcgagcacgacaaggcctacgaccagcagctcaaggccggagacaacccgtacctcaagtacaaccacgccgacgccgagttccaggagcggctcaaagaagatacgtcttttgggggcaacctcgggcgagcagtcttccaggccaaaaagaggcttcttgaacctcttggtctggttgaggaagcggctaagacggctcctggaaagaagaggcctgtagagcagtctcctcaggaaccggactcctccgcgggtattggcaaatcgggtgcacagcccgctaaaaagagactcaatttcggtcagactggcgacacagagtcagtcccagaccctcaaccaatcggagaacctcccgcagccccctcaggtgtgggatctcttacaatggcttcaggtggtggcgcaccagtggcagacaataacgaaggtgccgatggagtgggtagttcctcgggaaattggcattgcgattcccaatggctgggggacagagtcatcaccaccagcacccgaacctgggccctgcccacctacaacaatcacctctacaagcaaatctccaacagcacatctggaggatcttcaaatgacaacgcctacttcggctacagcaccccctgggggtattttgacttcaacagattccactgccacttctcaccacgtgactggcagcgactcatcaacaacaactggggattccggcctaagcgactcaacttcaagctcttcaacattcaggtcaaagaggttacggacaacaatggagtcaagaccatcgccaataaccttaccagcacggtccaggtcttcacggactcagactatcagctcccgtacgtgctcgggtcggctcacgagggctgcctcccgccgttcccagcggacgttttcatgattcctcagtacgggtatctgacgcttaatgatggaagccaggccgtgggtcgttcgtccttttactgcctggaatatttcccgtcgcaaatgctaagaacgggtaacaacttccagttcagctacgagtttgagaacgtacctttccatagcagctacgctcacagccaaagcctggaccgactaatgaatccactcatcgaccaatacttgtactatctctcaaagactattaacggttctggacagaatcaacaaacgctaaaattcagtgtggccggacccagcaacatggctgtccagggaagaaactacatacctggacccagctaccgacaacaacgtgtctcaaccactgtgactcaaaacaacaacagcgaatttgcttggcctggagcttcttcttgggctctcaatggacgtaatagcttgatgaatcctggacctgctatggccagccacaaagaaggagaggaccgtttctttcctttgtctggatctttaatttttggcaaacaaggaactggaagagacaacgtggatgcggacaaagtcatgataaccaacgaagaagaaattaaaactactaacccggtagcaacggagtcctatggacaagtggccttgaaccaccagagtgcccaagcacaggcgcagaccggctgggttcaaaaccaaggaatacttccgggtatggtttggcaggacagagatgtgtacctgcaaggacccatttgggccaaaattcctcacacggacggcaactttcacccttctccgctgatgggagggtttggaatgaagcacccgcctcctcagatcctcatcaaaaacacacctgtacctgcggatcctccaacggccttcaacaaggacaagctgaactctttcatcacccagtattctactggccaagtcagcgtggagatcgagtgggagctgcagaaggaaaacagcaagcgctggaacccggagatccagtacacttccaactattacaagtctaataatgttgaatttgctgttaatactgaaggtgtatatagtgaaccccgccccattggcaccagatacctgactcgtaatctg

SEQ ID NO: 242 - protein, 736 aa, synthetic construct
  REGION 1..736: note = Adeno Associated Virus Capsid Protein Variant
MAADGYLPDWLEDNLSEGIREWWALKPGAPQPKANQQHQDNARGLVLPGYKYLGPGNGLDKGEPVNAADAAALEHDKAYDQQLKAGDNPYLKYNHADAEFQERLKEDTSFGGNLGRAVFQAKKRLLEPLGLVEEAAKTAPGKKRPVEQSPQEPDSSAGIGKSGAQPAKKRLNFGQTGDTESVPDPQPIGEPPAAPSGVGSLTMASGGGAPVADNNEGADGVGSSSGNWHCDSQWLGDRVITTSTRTWALPTYNNHLYKQISNSTSGGSSNDNAYFGYSTPWGYFDFNRFHCHFSPRDWQRLINNNWGFRPKRLNFKLFNIQVKEVTDNNGVKTIANNLTSTVQVFTDSDYQLPYVLGSAHEGCLPPFPADVFMIPQYGYLTLNDGSQAVGRSSFYCLEYFPSQMLRTGNNFQFSYEFENVPFHSSYAHSQSLDRLMNPLIDQYLYYLSKTINGSGQNQQTLKFSVAGPSNMAVQGRNYIPGPSYRQQRVSTTVTQNNNSEFAWPGASSWALNGRNSLMNPGPAMASHKEGEDRFFPLSGSLIFGKQGTGRDNVDADKVMITNEEEIKTTNPVATESYGQVALNHQSAQAQAQTGWVQNQGILPGMVWQDRDVYLQGPIWAKIPHTDGNFHPSPLMGGFGMKHPPPQILIKNTPVPADPPTAFNKDKLNSFITQYSTGQVSVEIEWELQKENSKRWNPEIQYTSNYYKSNNVEFAVNTEGVYSEPRPIGTRYLTRNL

SEQ ID NO: 243 - DNA, 2208 bp, synthetic construct
  misc_feature 1..2208: note = Adeno Associated Virus Capsid Protein Variant
  source 1..2208: mol_type = other DNA
atggctgccgatggttatcttccagattggctcgaggacaaccttagtgaaggaattcgcgagtggtgggctttgaaacctggagcccctcaacccaaggcaaatcaacaacatcaagacaacgctcgaggtcttgtgcttccgggttacaaataccttggacccggcaacggactcgacaagggggagccggtcaacgcagcagacgcggcggccctcgagcacgacaaggcctacgaccagcagctcaaggccggagacaacccgtacctcaagtacaaccacgccgacgccgagttccaggagcggctcaaagaagatacgtcttttgggggcaacctcgggcgagcagtcttccaggccaaaaagaggcttcttgaacctcttggtctggttgaggaagcggctaagacggctcctggaaagaagaggcctgtagagcagtctcctcaggaaccggactcctccgcgggtattggcaaatcgggtgcacagcccgctaaaaagagactcaatttcggtcagactggcgacacagagtcagtcccagaccctcaaccaatcggagaacctcccgcagccccctcaggtgtgggatctcttacaatggcttcaggtggtggcgcaccagtggcagacaataacgaaggtgccgatggagtgggtagttcctcgggaaattggcattgcgattcccaatggctgggggacagagtcatcaccaccagcacccgaacctgggccctgcccacctacaacaatcacctctacaagcaaatctccaacagcacatctggaggatcttcaaatgacaacgcctacttcggctacagcaccccctgggggtattttgacttcaacagattccactgccacttctcaccacgtgactggcagcgactcatcaacaacaactggggattccggcctaagcgactcaacttcaagctcttcaacattcaggtcaaagaggttacggacaacaatggagtcaagaccatcgccaataaccttaccagcacggtccaggtcttcacggactcagactatcagctcccgtacgtgctcgggtcggctcacgagggctgcctcccgccgttcccagcggacgttttcatgattcctcagtacgggtatctgacgcttaatgatggaagccaggccgtgggtcgttcgtccttttactgcctggaatatttcccgtcgcaaatgctaagaacgggtaacaacttccagttcagctacgagtttgagaacgtacctttccatagcagctacgctcacagccaaagcctggaccgactaatgaatccactcatcgaccaatacttgtactatctctcaaagactattaacggttctggacagaatcaacaaacgctaaaattcagtgtggccggacccagcaacatggctgtccagggaagaaactacatacctggacccagctaccgacaacaacgtgtctcaaccactgtgactcaaaacaacaacagcgaatttgcttggcctggagcttcttcttgggctctcaatggacgtaatagcttgatgaatcctggacctgctatggccagccacaaagaaggagaggaccgtttctttcctttgtctggatctttaatttttggcaaacaaggaactggaagagacaaggtggatgcggacaaagtcatgataaccaacgaagaagaaattaaaactactaacccggtagcaacggagtcctatggacaagtggccacaaaccaccagagtgcccaagcacaggcgcagaccggctgggttcaaaaccaaggaatacttccgggtatggtttggcaggacagagatgtgtacctgcaaggacccatttgggccaaaattcctcacacggacggcaactttcacccttctccgctgatgggagggtttggaatgaagcacccgcctcctcagatcctcatcaaaaacacacctgtacctgcggatcctccaacggccttcaacaaggacaagctgaactctttcatcacccagtattctactggccaagtcagcgtggagatcgagtgggagctgcagaaggaaaacagcaagcgctggaacccggagatccagtacacttccaactattacaagtctaataatgttgaatttgctgttaatactgaaggtgtatatagtgaaccccgccccattggcaccagatacctgactcgtaatctg

SEQ ID NO: 244 - protein, 736 aa, synthetic construct
  REGION 1..736: note = Adeno Associated Virus Capsid Protein Variant
MAADGYLPDWLEDNLSEGIREWWALKPGAPQPKANQQHQDNARGLVLPGYKYLGPGNGLDKGEPVNAADAAALEHDKAYDQQLKAGDNPYLKYNHADAEFQERLKEDTSFGGNLGRAVFQAKKRLLEPLGLVEEAAKTAPGKKRPVEQSPQEPDSSAGIGKSGAQPAKKRLNFGQTGDTESVPDPQPIGEPPAAPSGVGSLTMASGGGAPVADNNEGADGVGSSSGNWHCDSQWLGDRVITTSTRTWALPTYNNHLYKQISNSTSGGSSNDNAYFGYSTPWGYFDFNRFHCHFSPRDWQRLINNNWGFRPKRLNFKLFNIQVKEVTDNNGVKTIANNLTSTVQVFTDSDYQLPYVLGSAHEGCLPPFPADVFMIPQYGYLTLNDGSQAVGRSSFYCLEYFPSQMLRTGNNFQFSYEFENVPFHSSYAHSQSLDRLMNPLIDQYLYYLSKTINGSGQNQQTLKFSVAGPSNMAVQGRNYIPGPSYRQQRVSTTVTQNNNSEFAWPGASSWALNGRNSLMNPGPAMASHKEGEDRFFPLSGSLIFGKQGTGRDKVDADKVMITNEEEIKTTNPVATESYGQVATNHQSAQAQAQTGWVQNQGILPGMVWQDRDVYLQGPIWAKIPHTDGNFHPSPLMGGFGMKHPPPQILIKNTPVPADPPTAFNKDKLNSFITQYSTGQVSVEIEWELQKENSKRWNPEIQYTSNYYKSNNVEFAVNTEGVYSEPRPIGTRYLTRNL

SEQ ID NO: 245 - DNA, 2208 bp, synthetic construct
  misc_feature 1..2208: note = Adeno Associated Virus Capsid Protein Variant
  source 1..2208: mol_type = other DNA
atggctgccgatggttatcttccagattggctcgaggacaaccttagtgaaggaattcgcgagtggtgggctttgaaacctggagcccctcaacccaaggcaaatcaacaacatcaagacaacgctcgaggtcttgtgcttccgggttacaaataccttggacccggcaacggactcgacaagggggagccggtcaacgcagcagacgcggcggccctcgagcacgacaaggcctacgaccagcagctcaaggccggagacaacccgtacctcaagtacaaccacgccgacgccgagttccaggagcggctcaaagaagatacgtcttttgggggcaacctcgggcgagcagtcttccaggccaaaaagaggcttcttgaacctcttggtctggttgaggaagcggctaagacggctcctggaaagaagaggcctgtagagcagtctcctcaggaaccggactcctccgcgggtattggcaaatcgggtgcacagcccgctaaaaagagactcaatttcggtcagactggcgacacagagtcagtcccagaccctcaaccaatcggagaacctcccgcagccccctcaggtgtgggatctcttacaatggcttcaggtggtggcgcaccagtggcagacaataacgaaggtgccgatggagtgggtagttcctcgggaaattggcattgcgattcccaatggctgggggacagagtcatcaccaccagcacccgaacctgggccctgcccacctacaacaatcacctctacaagcaaatctccaacagcacatctggaggatcttcaaatgacaacgcctacttcggctacagcaccccctgggggtattttgacttcaacagattccactgccacttctcaccacgtgactggcagcgactcatcaacaacaactggggattccggcctaagcgactcaacttcaagctcttcaacattcaggtcaaagaggttacggacaacaatggagtcaagaccatcgccaataaccttaccagcacggtccaggtcttcacggactcagactatcagctcccgtacgtgctcgggtcggctcacgagggctgcctcccgccgttcccagcggacgttttcatgattcctcagtacgggtatctgacgcttaatgatggaagccaggccgtgggtcgttcgtccttttactgcctggaatatttcccgtcgcaaatgctaagaacgggtaacaacttccagttcagctacgagtttgagaacgtacctttccatagcagctacgctcacagccaaagcctggaccgactaatgaatccactcatcgaccaatacttgtactatctctcaaagactattaacggttctggacagaatcaacaaacgctaaaattcagtgtggccggacccagcaacatggctgtccagggaagaaactacatacctggacccagctaccgacaacaacgtgtctcaaccactgtgactcaaaacaacaacagcgaatttgcttggcctggagcttcttcttgggctctcaatggacgtaatagcttgatgaatcctggacctgctatggccagccacaaagaaggagagtgtcgtttctttcctttgtctggatctttaatttttggcaaacaaggaactggaagagacaacgtggatgcggacaaagtcatgataaccaacgaagaagaaattaaaactactaacccggtagcaacggagtcctatggacaagtggccacaaaccaccagagtgcccaagcacaggcgcagaccggctgggttcaaaaccaaggaatacttccgggtatggtttggcaggacagagatgtgtacctgcaaggacccatttgggccaaaattcctcacacggacggcaactttcacccttctccgctgatgggagggtttggaatgaagcacccgcctcctcagatcctcatcaaaaacacacctgtacctgcggatcctccaacggccttcaacaaggacaagctgaactctttcatcacccagtattctactggccaagtcagcgtggagatcgagtgggagctgcagaaggaaaacagcaagcgctggaacccggagatccagtacacttccaactattacaagtctaataatgttgaatttgctgttaatactgaaggtgtatatagtgaaccccgccccattggcaccagatacctgactcgtaatctg

SEQ ID NO: 246 - protein, 736 aa, synthetic construct
  REGION 1..736: note = Adeno Associated Virus Capsid Protein Variant
MAADGYLPDWLEDNLSEGIREWWALKPGAPQPKANQQHQDNARGLVLPGYKYLGPGNGLDKGEPVNAADAAALEHDKAYDQQLKAGDNPYLKYNHADAEFQERLKEDTSFGGNLGRAVFQAKKRLLEPLGLVEEAAKTAPGKKRPVEQSPQEPDSSAGIGKSGAQPAKKRLNFGQTGDTESVPDPQPIGEPPAAPSGVGSLTMASGGGAPVADNNEGADGVGSSSGNWHCDSQWLGDRVITTSTRTWALPTYNNHLYKQISNSTSGGSSNDNAYFGYSTPWGYFDFNRFHCHFSPRDWQRLINNNWGFRPKRLNFKLFNIQVKEVTDNNGVKTIANNLTSTVQVFTDSDYQLPYVLGSAHEGCLPPFPADVFMIPQYGYLTLNDGSQAVGRSSFYCLEYFPSQMLRTGNNFQFSYEFENVPFHSSYAHSQSLDRLMNPLIDQYLYYLSKTINGSGQNQQTLKFSVAGPSNMAVQGRNYIPGPSYRQQRVSTTVTQNNNSEFAWPGASSWALNGRNSLMNPGPAMASHKEGECRFFPLSGSLIFGKQGTGRDNVDADKVMITNEEEIKTTNPVATESYGQVATNHQSAQAQAQTGWVQNQGILPGMVWQDRDVYLQGPIWAKIPHTDGNFHPSPLMGGFGMKHPPPQILIKNTPVPADPPTAFNKDKLNSFITQYSTGQVSVEIEWELQKENSKRWNPEIQYTSNYYKSNNVEFAVNTEGVYSEPRPIGTRYLTRNL

SEQ ID NO: 247 - DNA, 2208 bp, synthetic construct
  misc_feature 1..2208: note = Adeno Associated Virus Capsid Protein Variant
  source 1..2208: mol_type = other DNA
atggctgccgatggttatcttccagattggctcgaggacaaccttagtgaaggaattcgcgagtggtgggctttgaaacctggagcccctcaacccaaggcaaatcaacaacatcaagacaacgctcgaggtcttgtgcttccgggttacaaataccttggacccggcaacggactcgacaagggggagccggtcaacgcagcagacgcggcggccctcgagcacgacaaggcctacgaccagcagctcaaggccggagacaacccgtacctcaagtacaaccacgccgacgccgagttccaggagcggctcaaagaagatacgtcttttgggggcaacctcgggcgagcagtcttccaggccaaaaagaggcttcttgaacctcttggtctggttgaggaagcggctaagacggctcctggaaagaagaggcctgtagagcagtctcctcaggaaccggactcctccgcgggtattggcaaatcgggtgcacagcccgctaaaaagagactcaatttcggtcagactggcgacacagagtcagtcccagaccctcaaccaatcggagaacctcccgcagccccctcaggtgtgggatctcttacaatggcttcaggtggtggcgcaccagtggcagacaataacgaaggtgccgatggagtgggtagttcctcgggaaattggcattgcgattcccaatggctgggggacagagtcatcaccaccagcacccgaacctgggccctgcccacctacaacaatcacctctacaagcaaatctccaacagcacatctggaggatcttcaaatgacaacgcctacttcggctacagcaccccctgggggtattttgacttcaacagattccactgccacttctcaccacgtgactggcagcgactcatcaacaacaactggggattccggcctaagcgactcaacttcaagctcttcaacattcaggtcaaagaggttacggacaacaatggagtcaagaccatcgccaataaccttaccagcacggtccaggtcttcacggactcagactatcagctcccgtacgtgctcgggtcggctcacgagggctgcctcccgccgttcccagcggacgttttcatgattcctcagtacgggtatctgacgcttaatgatggaagccaggccgtgggtcgttcgtccttttactgcctggaatatttcccgtcgcaaatgctaagaacgggtaacaacttccagttcagctacgagtttgagaacgtacctttccatagcagctacgctcacagccaaagcctggaccgactaatgaatccactcatcgaccaatacttgtactatctctcaaagactattaacggttctggacagaatcaacaaacgctaaaattcagtgtggccggacccagcaacatggctgtccagggaagaaactacatacctggacccagctaccgacaacaacgtgtctcaaccactgtgactcaaaacaacaacagccattttgcttggcctggagcttcttcttgggctctcaatggacgtaatagcttgatgaatcctggacctgctatggccagccacaaagaaggagaggaccgtttctttcctttgtctggatctttaatttttggcaaacaaggaactggaagagacaacgtggatgcggacaaagtcatgataaccaacgaagaagaaattaaaactactaacccggtagcaacggagtcctatggacaagtggccacaaaccaccagagtgcccaagcacaggcgcagaccggctgggttcaaaaccaaggaatacttccgggtatggtttggcaggacagagatgtgtacctgcaaggacccatttgggccaaaattcctcacacggacggcaactttcacccttctccgctgatgggagggtttggaatgaagcacccgcctcctcagatcctcatcaaaaacacacctgtacctgcggatcctccaacggccttcaacaaggacaagctgaactctttcatcacccagtattctactggccaagtcagcgtggagatcgagtgggagctgcagaaggaaaacagcaagcgctggaacccggagatccagtacacttccaactattacaagtctaataatgttgaatttgctgttaatactgaaggtgtatatagtgaaccccgccccattggcaccagatacctgactcgtaatctg

SEQ ID NO: 248 - protein, 736 aa, synthetic construct
  REGION 1..736: note = Adeno Associated Virus Capsid Protein Variant
MAADGYLPDWLEDNLSEGIREWWALKPGAPQPKANQQHQDNARGLVLPGYKYLGPGNGLDKGEPVNAADAAALEHDKAYDQQLKAGDNPYLKYNHADAEFQERLKEDTSFGGNLGRAVFQAKKRLLEPLGLVEEAAKTAPGKKRPVEQSPQEPDSSAGIGKSGAQPAKKRLNFGQTGDTESVPDPQPIGEPPAAPSGVGSLTMASGGGAPVADNNEGADGVGSSSGNWHCDSQWLGDRVITTSTRTWALPTYNNHLYKQISNSTSGGSSNDNAYFGYSTPWGYFDFNRFHCHFSPRDWQRLINNNWGFRPKRLNFKLFNIQVKEVTDNNGVKTIANNLTSTVQVFTDSDYQLPYVLGSAHEGCLPPFPADVFMIPQYGYLTLNDGSQAVGRSSFYCLEYFPSQMLRTGNNFQFSYEFENVPFHSSYAHSQSLDRLMNPLIDQYLYYLSKTINGSGQNQQTLKFSVAGPSNMAVQGRNYIPGPSYRQQRVSTTVTQNNNSHFAWPGASSWALNGRNSLMNPGPAMASHKEGEDRFFPLSGSLIFGKQGTGRDNVDADKVMITNEEEIKTTNPVATESYGQVATNHQSAQAQAQTGWVQNQGILPGMVWQDRDVYLQGPIWAKIPHTDGNFHPSPLMGGFGMKHPPPQILIKNTPVPADPPTAFNKDKLNSFITQYSTGQVSVEIEWELQKENSKRWNPEIQYTSNYYKSNNVEFAVNTEGVYSEPRPIGTRYLTRNL

SEQ ID NO: 249 - DNA, 2208 bp, synthetic construct
  misc_feature 1..2208: note = Adeno Associated Virus Capsid Protein Variant
  source 1..2208: mol_type = other DNA
atggctgccgatggttatcttccagattggctcgaggacaaccttagtgaaggaattcgcgagtggtgggctttgaaacctggagcccctcaacccaaggcaaatcaacaacatcaagacaacgctcgaggtcttgtgcttccgggttacaaataccttggacccggcaacggactcgacaagggggagccggtcaacgcagcagacgcggcggccctcgagcacgacaaggcctacgaccagcagctcaaggccggagacaacccgtacctcaagtacaaccacgccgacgccgagttccaggagcggctcaaagaagatacgtcttttgggggcaacctcgggcgagcagtcttccaggccaaaaagaggcttcttgaacctcttggtctggttgaggaagcggctaagacggctcctggaaagaagaggcctgtagagcagtctcctcaggaaccggactcctccgcgggtattggcaaatcgggtgcacagcccgctaaaaagagactcaatttcggtcagactggcgacacagagtcagtcccagaccctcaaccaatcggagaacctcccgcagccccctcaggtgtgggatctcttacaatggcttcaggtggtggcgcaccagtggcagacaataacgaaggtgccgatggagtgggtagttcctcgggaaattggcattgcgattcccaatggctgggggacagagtcatcaccaccagcacccgaacctgggccctgcccacctacaacaatcacctctacaagcaaatctccaacagcacatctggaggatcttcaaatgacaacgcctacttcggctacagcaccccctgggggtattttgacttcaacagattccactgccacttctcaccacgtgactggcagcgactcatcaacaacaactggggattccggcctaagcgactcaacttcaagctcttcaacattcaggtcaaagaggttacggacaacaatggagtcaagaccatcgccaataaccttaccagcacggtccaggtcttcacggactcagactatcagctcccgtacgtgctcgggtcggctcacgagggctgcctcccgccgttcccagcggacgttttcatgattcctcagtacgggtatctgacgcttaatgatggaagccaggccgtgggtcgttcgtccttttactgcctggaatatttcccgtcgcaaatgctaagaacgggtaacaacttccagttcagctacgagtttgagaacgtacctttccatagcagctacgctcacagccaaagcctggaccgactaatgaatccactcatcgaccaatacttgtactatctctcaaagactattaacggttctggacagaatcaacaaacgctaaaattcagtgtggccggacccagcaacatggctgtccagggaagaaactacatacctggacccagctaccgacaacaacgtgtctcaaccactgtgactcaaaacaacaacagcgaatttgcttggcctggagcttcttcttgggctctcaatggacgtaatagcttgatgaatcctggacctgctatggccagccacaaagaaggagaggaccgtttctttcctttgtctggatctttaatttttggcaaacaaggaactggaagagacaacgtggattcggacaaagtcatgataaccaacgaagaagaaattaaaactactaacccggtagcaacggagtcctatggacaagtggccacaaaccaccagagtgcccaagcacaggcgcagaccggctgggttcaaaaccaaggaatacttccgggtatggtttggcaggacagagatgtgtacctgcaaggacccatttgggccaaaattcctcacacggacggcaactttcacccttctccgctgatgggagggtttggaatgaagcacccgcctcctcagatcctcatcaaaaacacacctgtacctgcggatcctccaacggccttcaacaaggacaagctgaactctttcatcacccagtattctactggccaagtcagcgtggagatcgagtgggagctgcagaaggaaaacagcaagcgctggaacccggagatccagtacacttccaactattacaagtctaataatgttgaatttgctgttaatactgaaggtgtatatagtgaaccccgccccattggcaccagatacctgactcgtaatctg

SEQ ID NO: 250 - protein, 736 aa, synthetic construct
  REGION 1..736: note = Adeno Associated Virus Capsid Protein Variant
MAADGYLPDWLEDNLSEGIREWWALKPGAPQPKANQQHQDNARGLVLPGYKYLGPGNGLDKGEPVNAADAAALEHDKAYDQQLKAGDNPYLKYNHADAEFQERLKEDTSFGGNLGRAVFQAKKRLLEPLGLVEEAAKTAPGKKRPVEQSPQEPDSSAGIGKSGAQPAKKRLNFGQTGDTESVPDPQPIGEPPAAPSGVGSLTMASGGGAPVADNNEGADGVGSSSGNWHCDSQWLGDRVITTSTRTWALPTYNNHLYKQISNSTSGGSSNDNAYFGYSTPWGYFDFNRFHCHFSPRDWQRLINNNWGFRPKRLNFKLFNIQVKEVTDNNGVKTIANNLTSTVQVFTDSDYQLPYVLGSAHEGCLPPFPADVFMIPQYGYLTLNDGSQAVGRSSFYCLEYFPSQMLRTGNNFQFSYEFENVPFHSSYAHSQSLDRLMNPLIDQYLYYLSKTINGSGQNQQTLKFSVAGPSNMAVQGRNYIPGPSYRQQRVSTTVTQNNNSEFAWPGASSWALNGRNSLMNPGPAMASHKEGEDRFFPLSGSLIFGKQGTGRDNVDSDKVMITNEEEIKTTNPVATESYGQVATNHQSAQAQAQTGWVQNQGILPGMVWQDRDVYLQGPIWAKIPHTDGNFHPSPLMGGFGMKHPPPQILIKNTPVPADPPTAFNKDKLNSFITQYSTGQVSVEIEWELQKENSKRWNPEIQYTSNYYKSNNVEFAVNTEGVYSEPRPIGTRYLTRNL

SEQ ID NO: 251 - DNA, 2208 bp, synthetic construct
  misc_feature 1..2208: note = Adeno Associated Virus Capsid Protein Variant
  source 1..2208: mol_type = other DNA
atggctgccgatggttatcttccagattggctcgaggacaaccttagtgaaggaattcgcgagtggtgggctttgaaacctggagcccctcaacccaaggcaaatcaacaacatcaagacaacgctcgaggtcttgtgcttccgggttacaaataccttggacccggcaacggactcgacaagggggagccggtcaacgcagcagacgcggcggccctcgagcacgacaaggcctacgaccagcagctcaaggccggagacaacccgtacctcaagtacaaccacgccgacgccgagttccaggagcggctcaaagaagatacgtcttttgggggcaacctcgggcgagcagtcttccaggccaaaaagaggcttcttgaacctcttggtctggttgaggaagcggctaagacggctcctggaaagaagaggcctgtagagcagtctcctcaggaaccggactcctccgcgggtattggcaaatcgggtgcacagcccgctaaaaagagactcaatttcggtcagactggcgacacagagtcagtcccagaccctcaaccaatcggagaacctcccgcagccccctcaggtgtgggatctcttacaatggcttcaggtggtggcgcaccagtggcagacaataacgaaggtgccgatggagtgggtagttcctcgggaaattggcattgcgattcccaatggctgggggacagagtcatcaccaccagcacccgaacctgggccctgcccacctacaacaatcacctctacaagcaaatctccaacagcacatctggaggatcttcaaatgacaacgcctacttcggctacagcaccccctgggggtattttgacttcaacagattccactgccacttctcaccacgtgactggcagcgactcatcaacaacaactggggattccggcctaagcgactcaacttcaagctcttcaacattcaggtcaaagaggttacggacaacaatggagtcaagaccatcgccaataaccttaccagcacggtccaggtcttcacggactcagactatcagctcccgtacgtgctcgggtcggctcacgagggctgcctcccgccgttcccagcggacgttttcatgattcctcagtacgggtatctgacgcttaatgatggaagccaggccgtgggtcgttcgtccttttactgcctggaatatttcccgtcgcaaatgctaagaacgggtaacaacttccagttcagctacgagtttgagaatgtacctttccatagcagctacgctcacagccaaagcctggaccgactaatgaatccactcatcgaccaatacttgtactatctctcaaagactattaacggttctggacagaatcaacaaacgctaaaattcagtgtggccggacccagcaacatggctgtccagggaagaaactacatacctggacccagctaccgacaacaacgtgtctcaaccactgtgactcaaaacaacaacagcgaatttgcttggcctggagcttcttcttgggctctcaatggacgtaatagcttgatgaatcctggacctgctatggccagccacaaagaaggagaggaccgtttctttcctttgtctggatctttaatttttggcaaacaaggaactggaagagacaacgtggatgcggacaaagtcatgataaccaacgaagaagaaattaaaactactaacccggtagcaacggagtcctatggacaagtggccacaaaccaccagagtgcccaagcacaggcgcagaccggctgggttcaaaaccaaggaatacttccgggtatggtttggcaggacagagatgtgtacctgcaaggacccatttgggccaaaattcctcacacggacggcaactttcacccttctccgctgatgggagggtttggactgaagcacccgcctcctcagatcctcatcaaaaacacacctgtacctgcggatcctccaacggccttcaacaaggacaagctgaactctttcatcacccagtattctactggccaagtcagcgtggagatcgagtgggagctgcagaaggaaaacagcaagcgctggaacccggagatccagtacacttccaactattacaagtctaataatgttgaatttgctgttaatactgaaggtgtatatagtgaaccccgccccattggcaccagatacctgactcgtaatctg

SEQ ID NO: 252 - protein, 736 aa, synthetic construct
  REGION 1..736: note = Adeno Associated Virus Capsid Protein Variant
MAADGYLPDWLEDNLSEGIREWWALKPGAPQPKANQQHQDNARGLVLPGYKYLGPGNGLDKGEPVNAADAAALEHDKAYDQQLKAGDNPYLKYNHADAEFQERLKEDTSFGGNLGRAVFQAKKRLLEPLGLVEEAAKTAPGKKRPVEQSPQEPDSSAGIGKSGAQPAKKRLNFGQTGDTESVPDPQPIGEPPAAPSGVGSLTMASGGGAPVADNNEGADGVGSSSGNWHCDSQWLGDRVITTSTRTWALPTYNNHLYKQISNSTSGGSSNDNAYFGYSTPWGYFDFNRFHCHFSPRDWQRLINNNWGFRPKRLNFKLFNIQVKEVTDNNGVKTIANNLTSTVQVFTDSDYQLPYVLGSAHEGCLPPFPADVFMIPQYGYLTLNDGSQAVGRSSFYCLEYFPSQMLRTGNNFQFSYEFENVPFHSSYAHSQSLDRLMNPLIDQYLYYLSKTINGSGQNQQTLKFSVAGPSNMAVQGRNYIPGPSYRQQRVSTTVTQNNNSEFAWPGASSWALNGRNSLMNPGPAMASHKEGEDRFFPLSGSLIFGKQGTGRDNVDADKVMITNEEEIKTTNPVATESYGQVATNHQSAQAQAQTGWVQNQGILPGMVWQDRDVYLQGPIWAKIPHTDGNFHPSPLMGGFGLKHPPPQILIKNTPVPADPPTAFNKDKLNSFITQYSTGQVSVEIEWELQKENSKRWNPEIQYTSNYYKSNNVEFAVNTEGVYSEPRPIGTRYLTRNL

SEQ ID NO: 253 - DNA, 2208 bp, synthetic construct
  misc_feature 1..2208: note = Adeno Associated Virus Capsid Protein Variant
  source 1..2208: mol_type = other DNA
atggctgccgatggttatcttccagattggctcgaggacaaccttagtgaaggaattcgcgagtggtgggctttgaaacctggagcccctcaacccaaggcaaatcaacaacatcaagacaacgctcgaggtcttgtgcttccgggttacaaataccttggacccggcaacggactcgacaagggggagccggtcaacgcagcagacgcggcggccctcgagcacgacaaggcctacgaccagcagctcaaggccggagacaacccgtacctcaagtacaaccacgccgacgccgagttccaggagcggctcaaagaagatacgtcttttgggggcaacctcgggcgagcagtcttccaggccaaaaagaggcttcttgaacctcttggtctggttgaggaagcggctaagacggctcctggaaagaagaggcctgtagagcagtctcctcaggaaccggactcctccgcgggtattggcaaatcgggtgcacagcccgctaaaaagagactcaatttcggtcagactggcgacacagagtcagtcccagaccctcaaccaatcggagaacctcccgcagccccctcaggtgtgggatctcttacaatggcttcaggtggtggcgcaccagtggcagacaataacgaaggtgccgatggagtgggtagttcctcgggaaattggcattgcgattcccaatggctgggggacagagtcatcaccaccagcacccgaacctgggccctgcccacctacaacaatcacctctacaagcaaatctccaacagcacatctggaggatcttcaaatgacaacgcctacttcggctacagcaccccctgggggtattttgacttcaacagattccactgccacttctcaccacgtgactggcagcgactcatcaacaacaactggggattccggcctaagcgactcaacttcaagctcttcaacattcaggtcaaagaggttacggacaacaatggagtcaagaccatcgccaataaccttaccagcacggtccaggtcttcacggactcagactatcagctcccgtacgtgctcgggtcggctcacgagggctgcctcccgccgttcccagcggacgttttcatgattcctcagtacgggtatctgacgcttaatgatggaagccaggccgtgggtcgttcgtccttttactgcctggaatatttcccgtcgcaaatgctaagaacgggtaacaacttccagttcagctacgagtttgagaacgtacctttccatagcagctacgctcacagccaaagcctggaccgactaatgaatccactcatcgaccaatacttgtactatctctcaaagactattaacggttctggacagaatcaacaaacgctaaaattcagtgtggccggacccagcaacatggctgtccagggaagaaactacatacctggacccagctaccgacaacaacgtgtctcaaccactgtgactcaaaacaacaacagcgaatttgcttggcctggagcttcttcttgggctctcaatggacgtaatagcttgatgaatcctggacctgctatggccagccacaaagcgggagaggaccgtttctttcctttgtctggatctttaatttttggcaaacaaggaactggaagagacaacgtggatgcggacaaagtcatgataaccaacgaagaagaaattaaaactactaacccggtagcaacggagtcctatggacaagtggccacaaaccaccagagtgcccaagcacaggcgcagaccggctgggttcaaaaccaaggaatacttccgggtatggtttggcaggacagagatgtgtacctgcaaggacccatttgggccaaaattcctcacacggacggcaactttcacccttctccgctgatgggagggtttggaatgaagcacccgcctcctcagatcctcatcaaaaacacacctgtacctgcggatcctccaacggccttcaacaaggacaagctgaactctttcatcacccagtattctactggccaagtcagcgtggagatcgagtgggagctgcagaaggaaaacagcaagcgctggaacccggagatccagtacacttccaactattacaagtctaataatgttgaatttgctgttaatactgaaggtgtatatagtgaaccccgccccattggcaccagatacctgactcgtaatctg

SEQ ID NO: 254 - protein, 736 aa, synthetic construct
  REGION 1..736: note = Adeno Associated Virus Capsid Protein Variant
MAADGYLPDWLEDNLSEGIREWWALKPGAPQPKANQQHQDNARGLVLPGYKYLGPGNGLDKGEPVNAADAAALEHDKAYDQQLKAGDNPYLKYNHADAEFQERLKEDTSFGGNLGRAVFQAKKRLLEPLGLVEEAAKTAPGKKRPVEQSPQEPDSSAGIGKSGAQPAKKRLNFGQTGDTESVPDPQPIGEPPAAPSGVGSLTMASGGGAPVADNNEGADGVGSSSGNWHCDSQWLGDRVITTSTRTWALPTYNNHLYKQISNSTSGGSSNDNAYFGYSTPWGYFDFNRFHCHFSPRDWQRLINNNWGFRPKRLNFKLFNIQVKEVTDNNGVKTIANNLTSTVQVFTDSDYQLPYVLGSAHEGCLPPFPADVFMIPQYGYLTLNDGSQAVGRSSFYCLEYFPSQMLRTGNNFQFSYEFENVPFHSSYAHSQSLDRLMNPLIDQYLYYLSKTINGSGQNQQTLKFSVAGPSNMAVQGRNYIPGPSYRQQRVSTTVTQNNNSEFAWPGASSWALNGRNSLMNPGPAMASHKAGEDRFFPLSGSLIFGKQGTGRDNVDADKVMITNEEEIKTTNPVATESYGQVATNHQSAQAQAQTGWVQNQGILPGMVWQDRDVYLQGPIWAKIPHTDGNFHPSPLMGGFGMKHPPPQILIKNTPVPADPPTAFNKDKLNSFITQYSTGQVSVEIEWELQKENSKRWNPEIQYTSNYYKSNNVEFAVNTEGVYSEPRPIGTRYLTRNL

SEQ ID NO: 255 - DNA, 2208 bp, synthetic construct
  misc_feature 1..2208: note = Adeno Associated Virus Capsid Protein Variant
  source 1..2208: mol_type = other DNA
atggctgccgatggttatcttccagattggctcgaggacaaccttagtgaaggaattcgcgagtggtgggcttcgaaacctggagcccctcaacccaaggcaaatcaacaacatcaagacaacgctcgaggtcttgtgcttccgggttacaaataccttggacccggcaacggactcgacaagggggagccggtcaacgcagcagacgcggcggccctcgagcacgacaaggcctacgaccagcagctcaaggccggagacaacccgtacctcaagtacaaccacgccgacgccgagttccaggagcggctcaaagaagatacgtcttttgggggcaacctcgggcgagcagtcttccaggccaaaaagaggcttcttgaacctcttggtctggttgaggaagcggctaagacggctcctggaaagaagaggcctgtagagcagtctcctcaggaaccggactcctccgcgggtattggcaaatcgggtgcacagcccgctaaaaagagactcaatttcggtcagactggcgacacagagtcagtcccagaccctcaaccaatcggagaacctcccgcagccccctcaggtgtgggatctcttacaatggcttcaggtggtggcgcaccagtggcagacaataacgaaggtgccgatggagtgggtagttcctcgggaaattggcattgcgattcccaatggctgggggacagagtcatcaccaccagcacccgaacctgggccctgcccacctacaacaatcacctctacaagcaaatctccaacagcacatctggaggatcttcaaatgacaacgcctacttcggctacagcaccccctgggggtattttgacttcaacagattccactgccacttctcaccacgtgactggcagcgactcatcaacaacaactggggattccggcctaagcgactcaacttcaagctcttcaacattcaggtcaaagaggttacggacaacaatggagtcaagaccatcgccaataaccttaccagcacggtccaggtcttcacggactcagactatcagctcccgtacgtgctcgggtcggctcacgagggctgcctcccgccgttcccagcggacgttttcatgattcctcagtacgggtatctgacgcttaatgatggaagccaggccgtgggtcgttcgtccttttactgcctggaatatttcccgtcgcaaatgctaagaacgggtaacaacttccagttcagctacgagtttgagaacgtacctttccatagcagctacgctcacagccaaagcctggaccgactaatgaatccactcatcgaccaatacttgtactatctctcaaagactattaacggttctggacagaatcaacaaacgctaaaattcagtgtggccggacccagcaacatggctgtccagggaagaaactacatacctggacccagctaccgacaacaacgtgtctcaacctgggtgactcaaaacaacaacagcgaatttgcttggcctggagcttcttcttgggctctcaatggacgtaatagcttgatgaatcctggacctgctatggccagccacaaagaaggagaggaccgtttctttcctttgtctggatctttaatttttggcaaacaaggaactggaagagacaacgtggatgcggacaaagtcatgataaccaacgaagaagaaattaaaactactaacccggtagcaacggagtcctatggacaagtggccacaaaccaccagagtgcccaagcacaggcgcagaccggctgggttcaaaaccaaggaatacttccgggtatggtttggcaggacagagatgtgtacctgcaaggacccatttgggccaaaattcctcacacggacggcaactttcacccttctccgctgatgggagggtttggaatgaagcacccgcctcctcagatcctcatcaaaaacacacctgtacctgcggatcctccaacggccttcaacaaggacaagctgaactctttcatcacccagtattctactggccaagtcagcgtggagatcgagtgggagctgcagaaggaaaacagcaagcgctggaacccggagatccagtacacttccaactattacaagtctaataatgttgaatttgctgttaatactgaaggtgtatatagtgaaccccgccccattggcaccagatacctgactcgtaatctg

SEQ ID NO: 256 - protein, 736 aa, synthetic construct
  REGION 1..736: note = Adeno Associated Virus Capsid Protein Variant
MAADGYLPDWLEDNLSEGIREWWASKPGAPQPKANQQHQDNARGLVLPGYKYLGPGNGLDKGEPVNAADAAALEHDKAYDQQLKAGDNPYLKYNHADAEFQERLKEDTSFGGNLGRAVFQAKKRLLEPLGLVEEAAKTAPGKKRPVEQSPQEPDSSAGIGKSGAQPAKKRLNFGQTGDTESVPDPQPIGEPPAAPSGVGSLTMASGGGAPVADNNEGADGVGSSSGNWHCDSQWLGDRVITTSTRTWALPTYNNHLYKQISNSTSGGSSNDNAYFGYSTPWGYFDFNRFHCHFSPRDWQRLINNNWGFRPKRLNFKLFNIQVKEVTDNNGVKTIANNLTSTVQVFTDSDYQLPYVLGSAHEGCLPPFPADVFMIPQYGYLTLNDGSQAVGRSSFYCLEYFPSQMLRTGNNFQFSYEFENVPFHSSYAHSQSLDRLMNPLIDQYLYYLSKTINGSGQNQQTLKFSVAGPSNMAVQGRNYIPGPSYRQQRVSTWVTQNNNSEFAWPGASSWALNGRNSLMNPGPAMASHKEGEDRFFPLSGSLIFGKQGTGRDNVDADKVMITNEEEIKTTNPVATESYGQVATNHQSAQAQAQTGWVQNQGILPGMVWQDRDVYLQGPIWAKIPHTDGNFHPSPLMGGFGMKHPPPQILIKNTPVPADPPTAFNKDKLNSFITQYSTGQVSVEIEWELQKENSKRWNPEIQYTSNYYKSNNVEFAVNTEGVYSEPRPIGTRYLTRNL

SEQ ID NO: 257 - DNA, 2208 bp, synthetic construct
  misc_feature 1..2208: note = Adeno Associated Virus Capsid Protein Variant
  source 1..2208: mol_type = other DNA
atggctgccgatggttatcttccagattggctcgaggacaaccttagtgaaggaattcgcgagtggtgggctttgaaacctggagcccctcaacccaaggcaaatcaacaacatcaagacaacgctcgaggtcttgtgcttccgggttacaaataccttggacccggcaacggactcgacaagggggagccggtcaacgcagcagacgcggcggccctcgagcacgacaaggcctacgaccagcagctcaaggccggagacaacccgtacctcaagtacaaccacgccgacgccgagttccaggagcggctcaaagaagatacgtcttttgggggcaacctcgggcgagcagtcttccaggccaaaaagaggcttcttgaacctcttggtctggttgaggaagcggctaagacggctcctggaaagaagaggcctgtagagcagtctcctcaggaaccggactcctccgcgggtattggcaaatcgggtgcacagcccgctaaaaagagactcaatttcggtcagactggcgacacagagtcagtcccagaccctcaaccaatcggagaacctcccgcagccccctcaggtgtgggatctcttacaatggcttcaggtggtggcgcaccagtggcagacaataacgaaggtgccgatggagtgggtagttcctcgggaaattggcattgcgattcccaatggctgggggacagagtcatcaccaccagcacccgaacctgggccctgcccacctacaacaatcacctctacaagcaaatctccaacagcacatctggaggatcttcaaatgacaacgcctacttcggctacagcaccccctgggggtattttgacttcaacagattccactgccacttctcaccacgtgactggcagcgactcatcaacaacaactggggattccggcctaagcgactcaacttcaagctcttcaacattcaggtcaaagaggttacggacaacaatggagtcaagaccatcgccaataaccttaccagcacggtccaggtcttcacggactcagactatcagctcccgtacgtgctcgggtcggctcacgagggctgcctcccgccgttcccagcggacgttttcatgattcctcagtacgggtatctgacgcttaatgatggaagccaggccgtgggtcgttcgtccttttactgcctggaatatttcccgtcgcaaatgctaagaacgggtaacaacttccagttcagctacgagtttgagaacgtacctttccatagcagctacgctcacagccaaagcctggaccgactaatgaatccactcatcgaccaatacttgtactatctctcaaagactattaacggttctggacagaatcaacaaacgctaaaattcagtgtggccggacccagcaacatggctgtccagggaagaaactacatacctggacccagctaccgacaacaacgtgtctcaaccactgtgactcaaaacaacaacagcgaatttgcttggcctggagcttcttcttgggctctcaatggacgtaatagcttgatgaatcctggacctgctatggccagccacaaagaaggagaggaccgtttctttcctttgtctggatctttaatttttggcaaacaaggaactggaagagacaacgtggatgcggacaaagtcatgataaccaacgaagaagaaattaaaactactaacccggtagcaacggagtcctatggacaagtggccacaaaccaccagagtgcccaagcacaggcgcagaccggctgggttcaaaaccaaggaatacttccgggtatggtttggcaggacagagatgtgtacctgcaaggacccatttgggccaaaattcctcacacggacggcaactttcacccttctccgctgatgggagggtttggaatgaagcacccgcctcctcagatcctcatcaaaaacacacctgtacctgcggatcctccaacggccttcaacaagtggaagctgaactctttcatcacccagtattctactggccaagtcagcgtggagatcgagtgggagctgcagaaggaaaacagcaagcgctggaacccggagatccagtacacttccaactattacaagtctaataatgttgaatttgctgttaatactgaaggtgtatatagtgaaccccgccccattggcaccagatacctgactcgtaatctg

SEQ ID NO: 258 - protein, 736 aa, synthetic construct
  REGION 1..736: note = Adeno Associated Virus Capsid Protein Variant
MAADGYLPDWLEDNLSEGIREWWALKPGAPQPKANQQHQDNARGLVLPGYKYLGPGNGLDKGEPVNAADAAALEHDKAYDQQLKAGDNPYLKYNHADAEFQERLKEDTSFGGNLGRAVFQAKKRLLEPLGLVEEAAKTAPGKKRPVEQSPQEPDSSAGIGKSGAQPAKKRLNFGQTGDTESVPDPQPIGEPPAAPSGVGSLTMASGGGAPVADNNEGADGVGSSSGNWHCDSQWLGDRVITTSTRTWALPTYNNHLYKQISNSTSGGSSNDNAYFGYSTPWGYFDFNRFHCHFSPRDWQRLINNNWGFRPKRLNFKLFNIQVKEVTDNNGVKTIANNLTSTVQVFTDSDYQLPYVLGSAHEGCLPPFPADVFMIPQYGYLTLNDGSQAVGRSSFYCLEYFPSQMLRTGNNFQFSYEFENVPFHSSYAHSQSLDRLMNPLIDQYLYYLSKTINGSGQNQQTLKFSVAGPSNMAVQGRNYIPGPSYRQQRVSTTVTQNNNSEFAWPGASSWALNGRNSLMNPGPAMASHKEGEDRFFPLSGSLIFGKQGTGRDNVDADKVMITNEEEIKTTNPVATESYGQVATNHQSAQAQAQTGWVQNQGILPGMVWQDRDVYLQGPIWAKIPHTDGNFHPSPLMGGFGMKHPPPQILIKNTPVPADPPTAFNKWKLNSFITQYSTGQVSVEIEWELQKENSKRWNPEIQYTSNYYKSNNVEFAVNTEGVYSEPRPIGTRYLTRNL

SEQ ID NO: 259 - DNA, 2208 bp, synthetic construct
  misc_feature 1..2208: note = Adeno Associated Virus Capsid Protein Variant
  source 1..2208: mol_type = other DNA
atggctgccgatggttatcttccagattggctcgaggacaaccttagtgaaggaattcgcgagtggtgggctttgaaacctggagcccctcaacccaaggcaaatcaacaacatcaagacaacgctcgaggtcttgtgcttccgggttacaaataccttggacccggcaacggactcgacaagggggagccggtcaacgcagcagacgcggcggccctcgagcacgacaaggcctacgaccagcagctcaaggccggagacaacccgtacctcaagtacaaccacgccgacgccgagttccaggagcggctcaaagaagatacgtcttttgggggcaacctcgggcgagcagtcttccaggccaaaaagaggcttcttgaacctcttggtctggttgaggaagcggctaagacggctcctggaaagaagaggcctgtagagcagtctcctcaggaaccggactcctccgcgggtattggcaaatcgggtgcacagcccgctaaaaagagactcaatttcggtcagactggcgacacagagtcagtcccagaccctcaaccaatcggagaacctcccgcagccccctcaggtgtgggatctcttacaatggcttcaggtggtggcgcaccagtggcagacaataacgaaggtgccgatggagtgggtagttcctcgggaaattggcattgcgattcccaatggctgggggacagagtcatcaccaccagcacccgaacctgggccctgcccacctacaacaatcacctctacaagcaaatctccaacagcacatctggaggatcttcaaatgacaacgcctacttcggctacagcaccccctgggggtattttgacttcaacagattccactgccacttctcaccacgtgactggcagcgactcatcaacaacaactggggattccggcctaagcgactcaacttcaagctcttcaacattcaggtcaaagaggttacggacaacaatggagtcaagaccatcgccaataaccttaccagcacggtccaggtcttcacggactcagactatcagctcccgtacgtgctcgggtcggctcacgagggctgcctcccgccgttcccagcggacgttttcatgattcctcagtacgggtatctgacgcttaatgatggaagccaggccgtgggtcgttcgtccttttactgcctggaatatttcccgtcgcaaatgctaagaacgggtaacaacttccagttcagctacgagtttgagaacgtacctttccatagcagctacgctcacagccaaagcctggaccgactaatgaatccactcatcgaccaatacttgtactatctctcaaagactattaacggttctggacagaatcaacaaacgctaaaattcagtgtggccggacccagcaacatggctgtccagggaagaaactacatacctggacccagctaccgacaacaacgtgtctcaaccactgtgactcaaaacaacaacagcgaatttgcttggcctggagcttcttcttgggctctcaatggacgtaatagcttgatgaatcctggacctgctatggccagccacaaagaaggagaggaccgtttctttcctttgtctggatctttaatttttggcaaacaaggaactggaagagacaacgtgcaggcggacaaagtcatgataaccaacgaagaagaaattaaaactactaacccggtagcaacggagtcctatggacaagtggccacaaaccaccagagtgcccaagcacaggcgcagaccggctgggttcaaaaccaaggaatacttccgggtatggtttggcaggacagagatgtgtacctgcaaggacccatttgggccaaaattcctcacacggacggcaactttcacccttctccgctgatgggagggtttggaatgaagcacccgcctcctcagatcctcatcaaaaacacacctgtacctgcggatcctccaacggccttcaacaaggacaagctgaactctttcatcacccagtattctactggccaagtcagcgtggagatcgagtgggagctgcagaaggaaaacagcaagcgctggaacccggagatccagtacacttccaactattacaagtctaataatgttgaatttgctgttaatactgaaggtgtatatagtgaaccccgccccattggcaccagatacctgactcgtaatctg

SEQ ID NO: 260 - protein, 736 aa, synthetic construct
  REGION 1..736: note = Adeno Associated Virus Capsid Protein Variant
MAADGYLPDWLEDNLSEGIREWWALKPGAPQPKANQQHQDNARGLVLPGYKYLGPGNGLDKGEPVNAADAAALEHDKAYDQQLKAGDNPYLKYNHADAEFQERLKEDTSFGGNLGRAVFQAKKRLLEPLGLVEEAAKTAPGKKRPVEQSPQEPDSSAGIGKSGAQPAKKRLNFGQTGDTESVPDPQPIGEPPAAPSGVGSLTMASGGGAPVADNNEGADGVGSSSGNWHCDSQWLGDRVITTSTRTWALPTYNNHLYKQISNSTSGGSSNDNAYFGYSTPWGYFDFNRFHCHFSPRDWQRLINNNWGFRPKRLNFKLFNIQVKEVTDNNGVKTIANNLTSTVQVFTDSDYQLPYVLGSAHEGCLPPFPADVFMIPQYGYLTLNDGSQAVGRSSFYCLEYFPSQMLRTGNNFQFSYEFENVPFHSSYAHSQSLDRLMNPLIDQYLYYLSKTINGSGQNQQTLKFSVAGPSNMAVQGRNYIPGPSYRQQRVSTTVTQNNNSEFAWPGASSWALNGRNSLMNPGPAMASHKEGEDRFFPLSGSLIFGKQGTGRDNVQADKVMITNEEEIKTTNPVATESYGQVATNHQSAQAQAQTGWVQNQGILPGMVWQDRDVYLQGPIWAKIPHTDGNFHPSPLMGGFGMKHPPPQILIKNTPVPADPPTAFNKDKLNSFITQYSTGQVSVEIEWELQKENSKRWNPEIQYTSNYYKSNNVEFAVNTEGVYSEPRPIGTRYLTRNL

SEQ ID NO: 261 - DNA, 2208 bp, synthetic construct
  misc_feature 1..2208: note = Adeno Associated Virus Capsid Protein Variant
  source 1..2208: mol_type = other DNA
atggctgccgatggttatcttccagattggctcgaggacaaccttagtgaaggaattcgcgagtggtgggctttgaaacctggagcccctcaacccaaggcaaatcaacaacatcaagacaacgctcgaggtcttgtgcttccgggttacaaataccttggacccggcaacggactcgacaagggggagccggtcaacgcagcagacgcggcggccctcgagcacgacaaggcctacgaccagcagctcaaggccggagacaacccgtacctcaagtacaaccacgccgacgccgagttccaggagcggctcaaagaagatacgtcttttgggggcaacctcgggcgagcagtcttccaggccaaaaagaggcttcttgaacctcttggtctggttgaggaagcggctaagacggctcctggaaagaagaggcctgtagagcagtctcctcaggaaccggactcctccgcgggtattggcaaatcgggtgcacagcccgctaaaaagagactcaatttcggtcagactggcgacacagagtcagtcccagaccctcaaccaatcggagaacctcccgcagccccctcaggtgtgggatctcttacaatggcttcaggtggtggcgcaccagtggcagacaataacgaaggtgccgatggagtgggtagttcctcgggaaattggcattgcgattcccaatggctgggggacagagtcatcaccaccagcacccgaacctgggccctgcccacctacaacaatcacctctacaagcaaatctccaacagcacatctggaggatcttcaaatgacaacgcctacttcggctacagcaccccctgggggtattttgacttcaacagattccactgccacttctcaccacgtgactggcagcgactcatcaacaacaactggggattccggcctaagcgactcaacttcaagctcttcaacattcaggtcaaagaggttacggacaacaatggagtcaagaccatcgccaataaccttaccagcacggtccaggtcttcacggactcagactatcagctcccgtacgtgctcgggtcggctcacgagggctgcctcccgccgttcccagcggacgttttcatgattcctcagtacgggtatctgacgcttaatgatggaagccaggccgtgggtcgttcgtccttttactgcctggaatatttcccgtcgcaaatgctaagaacgggtaacaacttccagttcagctacgagtttgagaacgtacctttccatagcagctacgctcacagccaaagcctggaccgactaatgaatccactcatcgaccaatacttgtactatctctcaaagactattaacggttctggacagaatcaacaaacgctaaaattcagtgtggccggacccagcaacatggctgtccagggaagaaactacatacctggacccagctaccgacaacaacgtgtctcaaccactgtgactcaaaacaacaacagcgaatttgcttggcctggagcttcttcttgggctctcaatggacgtaatagcttgatgaatcctggacctgctatggccagccacaaagaaggagaggaccgtttctttcctttgtctggatctttaatttttggcaaacaaggaactggaagagacaacgtggatgcggacaaagtcatgataaccaacgaagaagaaattaaaactactaacccggtagcaacggagtcctatggacaagtggccacaaaccacattagtgcccaagcacaggcgcagaccggctgggttcaaaaccaaggaatacttccgggtatggtttggcaggacagagatgtgtacctgcaaggacccatttgggccaaaattcctcacacggacggcaactttcacccttctccgctgatgggagggtttggaatgaagcacccgcctcctcagatcctcatcaaaaacacacctgtacctgcggatcctccaacggccttcaacaaggacaagctgaactctttcatcacccagtattctactggccaagtcagcgtggagatcgagtgggagctgcagaaggaaaacagcaagcgctggaacccggagatccagtacacttccaactattacaagtctaataatgttgaatttgctgttaatactgaaggtgtatatagtgaaccccgccccattggcaccagatacctgactcgtaatctg

SEQ ID NO: 262 - protein, 736 aa, synthetic construct
  REGION 1..736: note = Adeno Associated Virus Capsid Protein Variant
MAADGYLPDWLEDNLSEGIREWWALKPGAPQPKANQQHQDNARGLVLPGYKYLGPGNGLDKGEPVNAADAAALEHDKAYDQQLKAGDNPYLKYNHADAEFQERLKEDTSFGGNLGRAVFQAKKRLLEPLGLVEEAAKTAPGKKRPVEQSPQEPDSSAGIGKSGAQPAKKRLNFGQTGDTESVPDPQPIGEPPAAPSGVGSLTMASGGGAPVADNNEGADGVGSSSGNWHCDSQWLGDRVITTSTRTWALPTYNNHLYKQISNSTSGGSSNDNAYFGYSTPWGYFDFNRFHCHFSPRDWQRLINNNWGFRPKRLNFKLFNIQVKEVTDNNGVKTIANNLTSTVQVFTDSDYQLPYVLGSAHEGCLPPFPADVFMIPQYGYLTLNDGSQAVGRSSFYCLEYFPSQMLRTGNNFQFSYEFENVPFHSSYAHSQSLDRLMNPLIDQYLYYLSKTINGSGQNQQTLKFSVAGPSNMAVQGRNYIPGPSYRQQRVSTTVTQNNNSEFAWPGASSWALNGRNSLMNPGPAMASHKEGEDRFFPLSGSLIFGKQGTGRDNVDADKVMITNEEEIKTTNPVATESYGQVATNHISAQAQAQTGWVQNQGILPGMVWQDRDVYLQGPIWAKIPHTDGNFHPSPLMGGFGMKHPPPQILIKNTPVPADPPTAFNKDKLNSFITQYSTGQVSVEIEWELQKENSKRWNPEIQYTSNYYKSNNVEFAVNTEGVYSEPRPIGTRYLTRNL

SEQ ID NO: 263 - DNA, 2208 bp, synthetic construct
  misc_feature 1..2208: note = Adeno Associated Virus Capsid Protein Variant
  source 1..2208: mol_type = other DNA
atggctgccgatggttatcttccagattggctcgaggacaaccttagtgaaggaattcgcgagtggtgggctttgaaacctggagcccctcaacccaaggcaaatcaacaacatcaagacaacgctcgaggtcttgtgcttccgggttacaaataccttggacccggcaacggactcgacaagggggagccggtcaacgcagcagacgcggcggccctcgagcacgacaaggcctacgaccagcagctcaaggccggagacaacccgtacctcaagtacaaccacgccgacgccgagttccaggagcggctcaaagaagatacgtcttttgggggcaacctcgggcgagcagtcttccaggccaaaaagaggcttcttgaacctcttggtctggttgaggaagcggctaagacggctcctggaaagaagaggcctgtagagcagtctcctcaggaaccggactcctccgcgggtattggcaaatcgggtgcacagcccgctaaaaagagactcaatttcggtcagactggcgacacagagtcagtcccagaccctcaaccaatcggagaacctcccgcagccccctcaggtgtgggatctcttacaatggcttcaggtggtggcgcaccagtggcagacaataacgaaggtgccgatggagtgggtagttcctcgggaaattggcattgcgattcccaatggctgggggacagagtcatcaccaccagcacccgaacctgggccctgcccacctacaacaatcacctctacaagcaaatctccaacagcacatctggaggatcttcaaatgacaacgcctacttcggctacagcaccccctgggggtattttgacttcaacagattccactgccacttctcaccacgtgactggcagcgactcatcaacaacaactggggattccggcctaagcgactcaacttcaagctcttcaacattcaggtcaaagaggttacggacaacaatggagtcaagaccatcgccaataaccttaccagcacggtccaggtcttcacggactcagactatcagctcccgtacgtgctcgggtcggctcacgagggctgcctcccgccgttcccagcggacgttttcatgattcctcagtacgggtatctgacgcttaatgatggaagccaggccgtgggtcgttcgtccttttactgcctggaatatttcccgtcgcaaatgctaagaacgggtaacaacttccagttcagctacgagtttgagaacgtacctttccatagcagctacgctcacagccaaagcctggaccgactaatgaatccactcatcgaccaatacttgtactatctctcaaagactattaacggttctggacagcggcaacaaacgctaaaattcagtgtggccggacccagcaacatggctgtccagggaagaaactacatacctggacccagctaccgacaacaacgtgtctcaaccactgtgactcaaaacaacaacagcgaatttgcttggcctggagcttcttcttgggctctcaatggacgtaatagcttgatgaatcctggacctgctatggccagccacaaagaaggagaggaccgtttctttcctttgtctggatctttaatttttggcaaacaaggaactggaagagacaacgtggatgcggacaaagtcatgataaccaacgaagaagaaattaaaactactaacccggtagcaacggagtcctatggacaagtggccacaaaccaccagagtgcccaagcacaggcgcagaccggctgggttcaaaaccaaggaatacttccgggtatggtttggcaggacagagatgtgtacctgcaaggacccatttgggccaaaattcctcacacggacggcaactttcacccttctccgctgatgggagggtttggaatgaagcacccgcctcctcagatcctcatcaaaaacacacctgtacctgcggatcctccaacggccttcaacaaggacaagctgaactctttcatcacccagtattctactggccaagtcagcgtggagatcgagtgggagctgcagaaggaaaacagcaagcgctggaacccggagatccagtacacttccaactattacaagtctaataatgttgaatttgctgttaatactgaaggtgtatatagtgaaccccgccccattggcaccagatacctgactcgtaatctg

SEQ ID NO: 264 - protein, 736 aa, synthetic construct
  REGION 1..736: note = Adeno Associated Virus Capsid Protein Variant
MAADGYLPDWLEDNLSEGIREWWALKPGAPQPKANQQHQDNARGLVLPGYKYLGPGNGLDKGEPVNAADAAALEHDKAYDQQLKAGDNPYLKYNHADAEFQERLKEDTSFGGNLGRAVFQAKKRLLEPLGLVEEAAKTAPGKKRPVEQSPQEPDSSAGIGKSGAQPAKKRLNFGQTGDTESVPDPQPIGEPPAAPSGVGSLTMASGGGAPVADNNEGADGVGSSSGNWHCDSQWLGDRVITTSTRTWALPTYNNHLYKQISNSTSGGSSNDNAYFGYSTPWGYFDFNRFHCHFSPRDWQRLINNNWGFRPKRLNFKLFNIQVKEVTDNNGVKTIANNLTSTVQVFTDSDYQLPYVLGSAHEGCLPPFPADVFMIPQYGYLTLNDGSQAVGRSSFYCLEYFPSQMLRTGNNFQFSYEFENVPFHSSYAHSQSLDRLMNPLIDQYLYYLSKTINGSGQRQQTLKFSVAGPSNMAVQGRNYIPGPSYRQQRVSTTVTQNNNSEFAWPGASSWALNGRNSLMNPGPAMASHKEGEDRFFPLSGSLIFGKQGTGRDNVDADKVMITNEEEIKTTNPVATESYGQVATNHQSAQAQAQTGWVQNQGILPGMVWQDRDVYLQGPIWAKIPHTDGNFHPSPLMGGFGMKHPPPQILIKNTPVPADPPTAFNKDKLNSFITQYSTGQVSVEIEWELQKENSKRWNPEIQYTSNYYKSNNVEFAVNTEGVYSEPRPIGTRYLTRNL

SEQ ID NO: 265 - DNA, 2208 bp, synthetic construct
  misc_feature 1..2208: note = Adeno Associated Virus Capsid Protein Variant
  source 1..2208: mol_type = other DNA
atggctgccgatggttatcttccagattggctcgaggacaaccttagtgaaggaattcgcgagtggtgggctttgaaacctggagcccctcaacccaaggcaaatcaacaacatcaagacaacgctcgaggtcttgtgcttccgggttacaaataccttggacccggcaacggactcgacaagggggagccggtcaacgcagcagacgcggcggccctcgagcacgacaaggcctacgaccagcagctcaaggccggagacaacccgtacctcaagtacaaccacgccgacgccgagttccaggagcggctcaaagaagatacgtcttttgggggcaacctcgggcgagcagtcttccaggccaaaaagaggcttcttgaacctcttggtctggttgaggaagcggctaagacggctcctggaaagaagaggcctgtagagcagtctcctcaggaaccggactcctccgcgggtattggcaaatcgggtgcacagcccgctaaaaagagactcaatttcggtcagactggcgacacagagtcagtcccagaccctcaaccaatcggagaacctcccgcagccccctcaggtgtgggatctcttacaatggcttcaggtggtggcgcaccagtggcagacaataacgaaggtgccgatggagtgggtagttcctcgggaaattggcattgcgattcccaatggctgggggacagagtcatcaccaccagcacccgaacctgggccctgcccacctacaacaatcacctctacaagcaaatctccaacagcacatctggaggatcttcaaatgacaacgcctacttcggctacagcaccccctgggggtattttgacttcaacagattccactgccacttctcaccacgtgactggcagcgactcatcaacaacaactggggattccggcctaagcgactcaacttcaagctcttcaacattcaggtcaaagaggttacggacaacaatggagtcaagaccatcgccaataaccttaccagcacggtccaggtcttcacggactcagactatcagctcccgtacgtgctcgggtcggctcacgagggctgcctcccgccgttcccagcggacgttttcatgattcctcagtacgggtatctgacgcttaatgatggaagccaggccgtgggtcgttcgtccttttactgcctggaatatttcccgtcgcaaatgctaagaacgggtaacaacttccagttcagctacgagtttgagaacgtacctttccatagcagctacgctcacagccaaagcctggaccgactaatgaatccactcatcgaccaatacttgtactatctctcaaagactattaacggttctggacagaatcaacaaacgctaaaattcagtgtggccggacccagcaacatggctgtccagggaagaaactacatacctggacccagctaccgacaacaacgtgtctcaaccactgtgactcaaaacaacaacagcgaatttgcttggcctggagcttcttcttgggctctcaatggacgtaatagcttgatgaatcctggacctgctatggccagccacaaagaaggagaggaccgtttctttcctttgtctggatctttaatttttggccctcaaggaactggaagagacaacgtggatgcggacaaagtcatgataaccaacgaagaagaaattaaaactactaacccggtagcaacggagtcctatggacaagtggccacaaaccaccagagtgcccaagcacaggcgcagaccggctgggttcaaaaccaaggaatacttccgggtatggtttggcaggacagagatgtgtacctgcaaggacccatttgggccaaaattcctcacacggacggcaactttcacccttctccgctgatgggagggtttggaatgaagcacccgcctcctcagatcctcatcaaaaacacacctgtacctgcggatcctccaacggccttcaacaaggacaagctgaactctttcatcacccagtattctactggccaagtcagcgtggagatcgagtgggagctgcagaaggaaaacagcaagcgctggaacccggagatccagtacacttccaactattacaagtctaataatgttgaatttgctgttaatactgaaggtgtatatagtgaaccccgccccattggcaccagatacctgactcgtaatctg

SEQ ID NO: 266 - protein, 736 aa, synthetic construct
  REGION 1..736: note = Adeno Associated Virus Capsid Protein Variant
MAADGYLPDWLEDNLSEGIREWWALKPGAPQPKANQQHQDNARGLVLPGYKYLGPGNGLDKGEPVNAADAAALEHDKAYDQQLKAGDNPYLKYNHADAEFQERLKEDTSFGGNLGRAVFQAKKRLLEPLGLVEEAAKTAPGKKRPVEQSPQEPDSSAGIGKSGAQPAKKRLNFGQTGDTESVPDPQPIGEPPAAPSGVGSLTMASGGGAPVADNNEGADGVGSSSGNWHCDSQWLGDRVITTSTRTWALPTYNNHLYKQISNSTSGGSSNDNAYFGYSTPWGYFDFNRFHCHFSPRDWQRLINNNWGFRPKRLNFKLFNIQVKEVTDNNGVKTIANNLTSTVQVFTDSDYQLPYVLGSAHEGCLPPFPADVFMIPQYGYLTLNDGSQAVGRSSFYCLEYFPSQMLRTGNNFQFSYEFENVPFHSSYAHSQSLDRLMNPLIDQYLYYLSKTINGSGQNQQTLKFSVAGPSNMAVQGRNYIPGPSYRQQRVSTTVTQNNNSEFAWPGASSWALNGRNSLMNPGPAMASHKEGEDRFFPLSGSLIFGPQGTGRDNVDADKVMITNEEEIKTTNPVATESYGQVATNHQSAQAQAQTGWVQNQGILPGMVWQDRDVYLQGPIWAKIPHTDGNFHPSPLMGGFGMKHPPPQILIKNTPVPADPPTAFNKDKLNSFITQYSTGQVSVEIEWELQKENSKRWNPEIQYTSNYYKSNNVEFAVNTEGVYSEPRPIGTRYLTRNL

SEQ ID NO: 267 - DNA, 2208 bp, synthetic construct
  misc_feature 1..2208: note = Adeno Associated Virus Capsid Protein Variant
  source 1..2208: mol_type = other DNA
atggctgccgatggttatcttccagattggctcgaggacaaccttagtgaaggaattcgcgagtggtgggctttgaaacctggagcccctcaacccaaggcaaatcaacaacatcaagacaacgctcgaggtcttgtgcttccgggttacaaataccttggacccggcaacggactcgacaagggggagccggtcaacgcagcagacgcggcggccctcgagcacgacaaggcctacgaccagcagctcaaggccggagacaacccgtacctcaagtacaaccacgccgacgccgagttccaggagcggctcaaagaagatacgtcttttgggggcaacctcgggcgagcagtcttccaggccaaaaagaggcttcttgaacctcttggtctggttgaggaagcggctaagacggctcctggaaagaagaggcctgtagagcagtctcctcaggaaccggactcctccgcgggtattggcaaatcgggtgcacagcccgctaaaaagagactcaatttcggtcagactggcgacacagagtcagtcccagaccctcaaccaatcggagaacctcccgcagccccctcaggtgtgggatctcttacaatggcttcaggtggtggcgcaccaatggcagacaataacgaaggtgccgatggagtgggtagttcctcgggaaattggcattgcgattcccaatggctgggggacagagtcatcaccaccagcacccgaacctgggccctgcccacctacaacaatcacctctacaagcaaatctccaacagcacatctggaggatcttcaaatgacaacgcctacttcggctacagcaccccctgggggtattttgacttcaacagattccactgccacttctcaccacgtgactggcagcgactcatcaacaacaactggggattccggcctaagcgactcaacttcaagctcttcaacattcaggtcaaagaggttacggacaacaatggagtcaagaccatcgccaataaccttaccagcacggtccaggtcttcacggactcagactatcagctcccgtacgtgctcgggtcggctcacgagggctgcctcccgccgttcccagcggacgttttcatgattcctcagtacgggtatctgacgcttaatgatggaagccaggccgtgggtcgttcgtccttttactgcctggaatatttcccgtcgcaaatgctaagaacgggtaacaacttccagttcagctacacctttgagaacgtacctttccatagcagctacgctcacagccaaagcctggaccgactaatgaatccactcatcgaccaatacttgtactatctctcaaagactattaacggttctggacagaatcaacaaacgctaaaattcagtgtggccggacccagcaacatggctgtccagggaagaaactacatacctggacccagctaccgacaacaacgtgtctcaaccactgtgactcaaaacaacaacagcgaatttgcttggcctggagcttcttcttgggctctcaatggacgtaatagcttgatgaatcctggacctgctatggccagccacaaagaaggagaggaccgtttctttcctttgtctggatctttaatttttggcaaacaaggaactggaagagacaacgtggatgcggacaaagtcatgataaccaacgaagaagaaattaaaactactaacccggtagcaacggagtcctatggacaagtggccacaaaccaccagagtgcccaagcacaggcgcagaccggctgggttcaaaaccaaggaatacttccgggtatggtttggcaggacagagatgtgtacctgcaaggacccatttgggccaaaattcctcacacggacggcaactttcacccttctccgctgatgggagggtttggaatgaagcacccgcctcctcagatcctcatcaaaaacacacctgtacctgcggatcctccaacggccttcaacaaggacaagctgaactctttcatcacccagtattctactggccaagtcagcgtggagatcgagtgggagctgcagaaggaaaacagcaagcgctggaacccggagatccagtacacttccaactattacaagtctaataatgttgaatttgctgttaatactgaaggtgtatatagtgaaccccgccccattggcaccagatacctgactcgtaatctg

SEQ ID NO: 268 - protein, 736 aa, synthetic construct
  REGION 1..736: note = Adeno Associated Virus Capsid Protein Variant
MAADGYLPDWLEDNLSEGIREWWALKPGAPQPKANQQHQDNARGLVLPGYKYLGPGNGLDKGEPVNAADAAALEHDKAYDQQLKAGDNPYLKYNHADAEFQERLKEDTSFGGNLGRAVFQAKKRLLEPLGLVEEAAKTAPGKKRPVEQSPQEPDSSAGIGKSGAQPAKKRLNFGQTGDTESVPDPQPIGEPPAAPSGVGSLTMASGGGAPMADNNEGADGVGSSSGNWHCDSQWLGDRVITTSTRTWALPTYNNHLYKQISNSTSGGSSNDNAYFGYSTPWGYFDFNRFHCHFSPRDWQRLINNNWGFRPKRLNFKLFNIQVKEVTDNNGVKTIANNLTSTVQVFTDSDYQLPYVLGSAHEGCLPPFPADVFMIPQYGYLTLNDGSQAVGRSSFYCLEYFPSQMLRTGNNFQFSYTFENVPFHSSYAHSQSLDRLMNPLIDQYLYYLSKTINGSGQNQQTLKFSVAGPSNMAVQGRNYIPGPSYRQQRVSTTVTQNNNSEFAWPGASSWALNGRNSLMNPGPAMASHKEGEDRFFPLSGSLIFGKQGTGRDNVDADKVMITNEEEIKTTNPVATESYGQVATNHQSAQAQAQTGWVQNQGILPGMVWQDRDVYLQGPIWAKIPHTDGNFHPSPLMGGFGMKHPPPQILIKNTPVPADPPTAFNKDKLNSFITQYSTGQVSVEIEWELQKENSKRWNPEIQYTSNYYKSNNVEFAVNTEGVYSEPRPIGTRYLTRNL

SEQ ID NO: 269 - DNA, 2208 bp, synthetic construct
  misc_feature 1..2208: note = Adeno Associated Virus Capsid Protein Variant
  source 1..2208: mol_type = other DNA
atggctgccgatggttatcttccagattggctcgaggacaaccttagtgaaggaattcgcgagtggtgggctttgaaacctggagcccctcaacccaaggcaaatcaacaacatcaagacaacgctcgaggtcttgtgcttccgggttacaaataccttggacccggcaacggactcgacaagggggagccggtcaacgcagcagacgcggcggccctcgagcacgacaaggcctacgaccagcagctcaaggccggagacaacccgtacctcaagtacaaccacgccgacgccgagttccaggagcggctcaaagaagatacgtcttttgggggcaacctcgggcgagcagtcttccaggccaaaaagaggcttcttgaacctcttggtctggttgaggaagcggctaagacggctcctggaaagaagaggcctgtagagcagtctcctcaggaaccggactcctccgcgggtattggcaaatcgggtgcacagcccgctaaaaagagactcaatttcggtcagactggcgacacagagtcagtcccagaccctcaaccaatcggagaacctcccgcagccccctcaggtgtgggatctcttacaatggcttcaggtggtggcgcaccagtggcagacaataacgaaggtgccgatggagtgggtagttcctcgggaaattggcattgcgattcccaatggctgggggacagagtcatcaccaccagcacccgaacctgggccctgcccacctacaacaatcacctctacaagcaaatctccaacagcacatctggaggatcttcaaatgacaacgcctacttcggctacagcaccccctgggggtattttgacttcaacagattccactgccacttctcaccacgtgactggcagcgactcatcaacaacaactggggattccggcctaagcgactcaacttcaagctcttcaacattcaggtcaaagaggttacggacaacaatggagtcaagaccatcgccaataaccttaccagcacggtccaggtcttcacggactcagactatcagctcccgtacgtgctcgggtcggctcacgagggctgcctcccgccgttcccagcggacgttttcatgattcctcagtacgggtatctgacgcttaatgatggaagccaggccgtgggtcgttcgtccttttactgcctggaatatttcccgtcgcaaatgctaagaacgggtaacaacttccagttcagctacgagtttgagaacgtacctttccatagcagctacgctcacagccaaagcctggaccgactaatgaatccactcatcgaccaatacttgtactatctctcaaagactattaacggttctggacagaatcaacaaacgctaaaattcagtgtggccggacccagcaacatggctgtccagggaagaaactacatacctggacccagctaccgacaacaacgtgtctcaaccactgtgactcaaaacaacaacagcgaatttgcttggcctggagcttcttcttgggctctcaatggacgtaatagcttgatgaatcctggacctgctatggccagccacaaagaaggagaggaccgtttctttcctttgtctgcgtctttaatttttggcaaacaaggaactggaagagacaacgtggatgcggacaaagtcatgataaccaacgaagaagaaattaaaactactaacccggtagcaacggagtcctatggacaagtggccacaaaccaccagagtgcccaagcacaggcgcagaccggctgggttcaaaaccaaggaatacttccgggtatggtttggcaggacagagatgtgtacctgcaaggacccatttgggccaaaattcctcacacggacggcaactttcacccttctccgctgatgggagggtttggaatgaagcacccgcctcctcagatcctcatcaaaaacacacctgtacctgcggatcctccaacggccttcaacaaggacaagctgaactctttcatcacccagtattctactggccaagtcagcgtggagatcgagtgggagctgcagaaggaaaacagcaagcgctggaacccggagatccagtacacttccaactattacaagtctaataatgttgaatttgctgttaatactgaaggtgtatatagtgaaccccgccccattggcaccagatacctgactcgtaatctg

SEQ ID NO: 270 - protein, 736 aa, synthetic construct
  REGION 1..736: note = Adeno Associated Virus Capsid Protein Variant
MAADGYLPDWLEDNLSEGIREWWALKPGAPQPKANQQHQDNARGLVLPGYKYLGPGNGLDKGEPVNAADAAALEHDKAYDQQLKAGDNPYLKYNHADAEFQERLKEDTSFGGNLGRAVFQAKKRLLEPLGLVEEAAKTAPGKKRPVEQSPQEPDSSAGIGKSGAQPAKKRLNFGQTGDTESVPDPQPIGEPPAAPSGVGSLTMASGGGAPVADNNEGADGVGSSSGNWHCDSQWLGDRVITTSTRTWALPTYNNHLYKQISNSTSGGSSNDNAYFGYSTPWGYFDFNRFHCHFSPRDWQRLINNNWGFRPKRLNFKLFNIQVKEVTDNNGVKTIANNLTSTVQVFTDSDYQLPYVLGSAHEGCLPPFPADVFMIPQYGYLTLNDGSQAVGRSSFYCLEYFPSQMLRTGNNFQFSYEFENVPFHSSYAHSQSLDRLMNPLIDQYLYYLSKTINGSGQNQQTLKFSVAGPSNMAVQGRNYIPGPSYRQQRVSTTVTQNNNSEFAWPGASSWALNGRNSLMNPGPAMASHKEGEDRFFPLSASLIFGKQGTGRDNVDADKVMITNEEEIKTTNPVATESYGQVATNHQSAQAQAQTGWVQNQGILPGMVWQDRDVYLQGPIWAKIPHTDGNFHPSPLMGGFGMKHPPPQILIKNTPVPADPPTAFNKDKLNSFITQYSTGQVSVEIEWELQKENSKRWNPEIQYTSNYYKSNNVEFAVNTEGVYSEPRPIGTRYLTRNL

SEQ ID NO: 271 - DNA, 2208 bp, synthetic construct
  misc_feature 1..2208: note = Adeno Associated Virus Capsid Protein Variant
  source 1..2208: mol_type = other DNA
atggctgccgatggttatcttccagattggctcgaggacaaccttagtgaaggaattcgcgagtggtgggctttgaaacctggagcccctcaacccaaggcaaatcaacaacatcaagacaacgctcgaggtcttgtgcttccgggttacaaataccttggacccggcaacggactcgacaagggggagccggtcaacgcagcagacgcggcggccctcgagcacgacaaggcctacgaccagcagctcaaggccggagacaacccgtacctcaagtacaaccacgccgacgccgagttccaggagcggctcaaagaagatacgtcttttgggggcaacctcgggcgagcagtcttccaggccaaaaagaggcttcttgaacctcttggtctggttgaggaagcggctaagacggctcctggaaagaagaggcctgtagagcagtctcctcaggaaccggactcctccgcgggtattggcaaatcgggtgcacagcccgctaaaaagagactcaatttcggtcagactggcgacacagagtcagtcccagaccctcaaccaatcggagaacctcccgcagccccctcaggtgtgggatctcttacaatggcttcaggtggtggcgcaccagtggcagacaataacgaaggtgccgatggagtgggtagttcctcgggaaattggcattgcgattcccaatggctgggggacagagtcatcaccaccagcacccgaacctgggccctgcccacctacaacaatcacctctacaagcaaatctccaacagcacatctggaggatcttcaaatgacaacgcctacttcggctacagcaccccctgggggtattttgacttcaacagattccactgccacttctcaccacgtgactggcagcgactcatcaacaacaactggggattccggcctaagcgactcaacttcaagctcttcaacattcaggtcaaagaggttacggacaacaatggagtcaagaccatcgccaataaccttaccagcacggtccaggtcttcacggactcagactatcagctcccgtacgtgctcgggtcggctcacgagggctgcctcccgccgttcccagcggacgttttcatgattcctcagtacgggtatctgacgcttaatgatggaagccaggccgtgggtcgttcgtccttttactgcctggaatatttcccgtcgcaaatgctaagaacgggtaacaacttccagttcagctacgagtttgagaacgtacctttccatagcagctacgctcacagccaaagcctggaccgactaatgaatccactcatcgaccaatacttgtactatctctcaaaaactattaacggttctggacagaatcaacaaacgctaaaattcagtgtggccggacccagcaacatggctgtccagggaagaaactacatacctggacccagctaccgacaacaacgtgtctcaaccactgtgactcaaaacaacaacagcgaatttgcttggcctggagcttcttcttgggctctcaatggacgtaatagcttgatgaatcctggacctgctatggccagccacaaagacggagaggaccgtttctttcctttgtctggatctttaatttttggcaaacaaggaactggaagagacaacgtggatgcggacaaagtcatgataaccaacgaagaagaaattaaaactactaacccggtagcaacggagtcctatggacaagtggccacaaaccaccagagtgcccaagcacaggcgcagaccggctgggttcaaaaccaaggaatacttccgggtatggtttggcaggacagagatgtgtacctgcaaggacccatttgggccaaaattcctcacacggacggcaactttcacccttctccgctgatgggagggtttggaatgaagcacccgcctcctcagatcctcatcaaaaacacacctgtacctgcggatcctccaacggccttcaacaaggacaagctgaactctttcatcacccagtattctactggccaagtcagcgtggagatcgagtgggagctgcagaaggaaaacagcaagcgctggaacccggagatccagtacacttccaactattacaagtctaataatgttgagtttgctgttaatactgaaggtgtatatagtgaaccccgccccattggcaccagatacctgactcgtaatctg

SEQ ID NO: 272 - protein, 736 aa, synthetic construct
  REGION 1..736: note = Adeno Associated Virus Capsid Protein Variant
MAADGYLPDWLEDNLSEGIREWWALKPGAPQPKANQQHQDNARGLVLPGYKYLGPGNGLDKGEPVNAADAAALEHDKAYDQQLKAGDNPYLKYNHADAEFQERLKEDTSFGGNLGRAVFQAKKRLLEPLGLVEEAAKTAPGKKRPVEQSPQEPDSSAGIGKSGAQPAKKRLNFGQTGDTESVPDPQPIGEPPAAPSGVGSLTMASGGGAPVADNNEGADGVGSSSGNWHCDSQWLGDRVITTSTRTWALPTYNNHLYKQISNSTSGGSSNDNAYFGYSTPWGYFDFNRFHCHFSPRDWQRLINNNWGFRPKRLNFKLFNIQVKEVTDNNGVKTIANNLTSTVQVFTDSDYQLPYVLGSAHEGCLPPFPADVFMIPQYGYLTLNDGSQAVGRSSFYCLEYFPSQMLRTGNNFQFSYEFENVPFHSSYAHSQSLDRLMNPLIDQYLYYLSKTINGSGQNQQTLKFSVAGPSNMAVQGRNYIPGPSYRQQRVSTTVTQNNNSEFAWPGASSWALNGRNSLMNPGPAMASHKDGEDRFFPLSGSLIFGKQGTGRDNVDADKVMITNEEEIKTTNPVATESYGQVATNHQSAQAQAQTGWVQNQGILPGMVWQDRDVYLQGPIWAKIPHTDGNFHPSPLMGGFGMKHPPPQILIKNTPVPADPPTAFNKDKLNSFITQYSTGQVSVEIEWELQKENSKRWNPEIQYTSNYYKSNNVEFAVNTEGVYSEPRPIGTRYLTRNL

SEQ ID NO: 273 - DNA, 2208 bp, synthetic construct
  misc_feature 1..2208: note = Adeno Associated Virus Capsid Protein Variant
  source 1..2208: mol_type = other DNA
atggctgccgatggttatcttccagattggctcgaggacaaccttagtgaaggaattcgcgagtggtgggctttgaaacctggagcccctcaacccaaggcaaatcaacaacatcaagacaacgctcgaggtcttgtgcttccgggttacaaataccttggacccggcaacggactcgacaagggggagccggtcaacgcagcagacgcggcggccctcgagcacgacaaggcctacgaccagcagctcaaggccggagacaacccgtacctcaagtacaaccacgccgacgccgagttccaggagcggctcaaagaagatacgtcttttgggggcaacctcgggcgagcagtcttccaggccaaaaagaggcttcttgaacctcttggtctggttgaggaagcggctaagacggctcctggaaagaagaggcctgtagagcagtctcctcaggaaccggactcctccgcgggtattggcaaatcgggtgcacagcccgctaaaaagagactcaatttcggtcagactggcgacacagagtcagtcccagaccctcaaccaatcggagaacctcccgcagccccctcaggtgtgggatctcttacaatggcttcaggtggtggcgcaccagtggcagacaataacgaaggtgccgatggagtgggtagttcctcgggaaattggcattgcgattcccaatggctgggggacagagtcatcaccaccagcacccgaacctgggccctgcccacctacaacaatcacctctacaagcaaatctccaacagcacatctggaggatcttcaaatgacaacgcctacttcggctacagcaccccctgggggtattttgacttcaacagattccactgccacttctcaccacgtgactggcagcgactcatcaacaacaactggggattccggcctaagcgactcaacttcaagctcttcaacattcaggtcaaagaggttacggacaacaatggagtcaagaccatcgccaataaccttaccagcacggtccaggtcttcacggactcagactatcagctcccgtacgtgctcgggtcggctcacgagggctgcctcccgccgttcccagcggacgttttcatgattcctcagtacgggtatctgacgcttaatgatggaagccaggccgtgggtcgttcgtccttttactgcctggaatatttcccgtcgcaaatgctaagaacgggtaacaacttccagttcagctacgagtttgagaacgtacctttccatagcagctacgctcacagccaaagcctggaccgactaatgaatccactcatcgaccaatacttgtactatctctcaaagactattaacggttctggacagaatcaacaaacgctaaaattcagtgtcgccggacccagcaacatggctgtccagggaagaaactacatacctggacccagctaccgacaacaacgtgtctcaaccactgtgactcaaaacaacaacagcgaatttgcttggcctggagcttcttcttgggctctcaatggacgtaatagcttgatgaatcctggacctgctatggccagccacaaagaaggagaggaccgtttctttcctttgtctggatctttaatttttggcaaacaaggaactggaagagacaacgtggatgcggacaaagtcatgataaccaacgaagaagaaattaaaactactaacccggtagcaacggagtcctatggacaagtggccacaaaccaccagagtgcccaaactcaggcgcagaccggctgggttcaaaaccaaggaatacttccgggtatggtttggcaggacagagatgtgtacctgcaaggacccatttgggccaaaattcctcacacggacggcaactttcacccttctccgctgatgggagggtttggactgaagcacccgcctcctcagatcctcatcaaaaacacacctgtacctgcggatcctccaacggccttcaacaaggacaagctgaactctttcatcacccagtattctactggccaagtcagcgtggagatcgagtgggagctgcagaaggaaaacagcaagcgctggaacccggagatccagtacacttccaactattacaagtctaataatgttgaatttgctgttaatactgaaggtgtatatagtgaaccccgccccattggcaccagatacctgactcgtaatctg

SEQ ID NO: 274 - protein, 736 aa, synthetic construct
  REGION 1..736: note = Adeno Associated Virus Capsid Protein Variant
MAADGYLPDWLEDNLSEGIREWWALKPGAPQPKANQQHQDNARGLVLPGYKYLGPGNGLDKGEPVNAADAAALEHDKAYDQQLKAGDNPYLKYNHADAEFQERLKEDTSFGGNLGRAVFQAKKRLLEPLGLVEEAAKTAPGKKRPVEQSPQEPDSSAGIGKSGAQPAKKRLNFGQTGDTESVPDPQPIGEPPAAPSGVGSLTMASGGGAPVADNNEGADGVGSSSGNWHCDSQWLGDRVITTSTRTWALPTYNNHLYKQISNSTSGGSSNDNAYFGYSTPWGYFDFNRFHCHFSPRDWQRLINNNWGFRPKRLNFKLFNIQVKEVTDNNGVKTIANNLTSTVQVFTDSDYQLPYVLGSAHEGCLPPFPADVFMIPQYGYLTLNDGSQAVGRSSFYCLEYFPSQMLRTGNNFQFSYEFENVPFHSSYAHSQSLDRLMNPLIDQYLYYLSKTINGSGQNQQTLKFSVAGPSNMAVQGRNYIPGPSYRQQRVSTTVTQNNNSEFAWPGASSWALNGRNSLMNPGPAMASHKEGEDRFFPLSGSLIFGKQGTGRDNVDADKVMITNEEEIKTTNPVATESYGQVATNHQSAQTQAQTGWVQNQGILPGMVWQDRDVYLQGPIWAKIPHTDGNFHPSPLMGGFGLKHPPPQILIKNTPVPADPPTAFNKDKLNSFITQYSTGQVSVEIEWELQKENSKRWNPEIQYTSNYYKSNNVEFAVNTEGVYSEPRPIGTRYLTRNL

SEQ ID NO: 275 - DNA, 2208 bp, synthetic construct
  misc_feature 1..2208: note = Adeno Associated Virus Capsid Protein Variant
  source 1..2208: mol_type = other DNA
atggctgccgatggttatcttccagattggctcgaggacaaccttagtgaaggaattcgcgagtggtgggctttgaaacctggagcccctcaacccaaggcaaatcaacaacatcaagacaacgctcgaggtcttgtgcttccgggttacaaataccttggacccggcaacggactcgacaagggggagccggtcaacgcagcagacgcggcggccctcgagcacgacaaggcctacgaccagcagctcaaggccggagacaacccgtacctcaagtacaaccacgccgacgccgagttccaggagcggctcaaagaagatacgtcttttgggggcaacctcgggcgagcagtcttccaggccaaaaagaggcttcttgaacctcttggtctggttgaggaagcggctaagacggctcctggaaagaagaggcctgtagagcagtctcctcaggaaccggactcctccgcgggtattggcaaatcgggtgcacagcccgctaaaaagagactcaatttcggtcagactggcgacacagagtcagtcccagaccctcaaccaatcggagaacctcccgcagccccctcaggtgtgggatctcttacaatggcttcaggtggtggcgcaccagtggcagacaataacgaaggtgccgatggagtgggtagttcctcgggaaattggcattgcgattcccaatggctgggggacagagtcatcaccaccagcacccgaacctgggccctgcccacctacaacaatcacctctacaagcaaatctccaacagcacatctggaggatcttcaaatgacaacgcctacttcggctacagcaccccctgggggtattttgacttcaacagattccactgccacttctcaccacgtgactggcagcgactcatcaacaacaactggggattccggcctaagcgactcaacttcaagctcttcaacattcaggtcaaagaggttacggacaacaatggagtcaagaccatcgccaataaccttaccagcacggtccaggtcttcacggactcagactatcagctcccgtacgtgctcgggtcggctcacgagggctgcctcccgccgttcccagcggacgttttcatgattcctcagtacgggtatctgacgcttaatgatggaagccaggccgtgggtcgttcgtccttttactgcctggaatatttcccgtcgcaaatgctaagaacgggtaacaacttccagttcagctacgagtttgagaacgtacctttccatagcagctacgctcacagccaaagcctggaccgactaatgaatccactcatcgaccaatacttgtactatctctcaaagactattaacggttctggacagaatcaacaaacgctaaaattcagtgtggccggacccagcaacatggctgtccagggaagaaactacatacctggacccagctaccgacaacaacgtgtctcaaccactgtgactcaaaacaacaacagcgaatttgcttggcctggagcttcttcttgggctctcaatggacgtaatagcttgatgaatcctggacctgctatggccagccacaaagaaggagaggaccgtttctttcctttgtctggatctttaatttttggcaaacaaggaactggaagagacaacgtggatgcggacaaagtcatgataaccaacgaagaagaaattaaaactactaacccggtagcaacggagtcctatggacaagtggccacaaaccaccagagtgcccaagcacaggcgggtaccggctgggttcaaaaccaaggaatacttccgggtatggtttggcaggacagagatgtgtacctgcaaggacccatttgggccaaaattcctcacacggacggcaactttcacccttctccgctgatgggagggtttggaatgaagcacccgcctcctcagatcctcatcaaaaacacacctgtacctgcggatcctccaacggccttcaacaaggacaagctgaactctttcatcacccagtattctactggccaagtcagcgtggagatcgagtgggagctgcagaaggaaaacagcaagcgctggaacccggagatccagtacacttccaactattacaagtctaataatgttgaatttgctgttaatactgaaggtgtatatagtgaaccccgccccattggcaccagatacctgactcgtaatctg

SEQ ID NO: 276 - protein, 736 aa, synthetic construct
  REGION 1..736: note = Adeno Associated Virus Capsid Protein Variant
MAADGYLPDWLEDNLSEGIREWWALKPGAPQPKANQQHQDNARGLVLPGYKYLGPGNGLDKGEPVNAADAAALEHDKAYDQQLKAGDNPYLKYNHADAEFQERLKEDTSFGGNLGRAVFQAKKRLLEPLGLVEEAAKTAPGKKRPVEQSPQEPDSSAGIGKSGAQPAKKRLNFGQTGDTESVPDPQPIGEPPAAPSGVGSLTMASGGGAPVADNNEGADGVGSSSGNWHCDSQWLGDRVITTSTRTWALPTYNNHLYKQISNSTSGGSSNDNAYFGYSTPWGYFDFNRFHCHFSPRDWQRLINNNWGFRPKRLNFKLFNIQVKEVTDNNGVKTIANNLTSTVQVFTDSDYQLPYVLGSAHEGCLPPFPADVFMIPQYGYLTLNDGSQAVGRSSFYCLEYFPSQMLRTGNNFQFSYEFENVPFHSSYAHSQSLDRLMNPLIDQYLYYLSKTINGSGQNQQTLKFSVAGPSNMAVQGRNYIPGPSYRQQRVSTTVTQNNNSEFAWPGASSWALNGRNSLMNPGPAMASHKEGEDRFFPLSGSLIFGKQGTGRDNVDADKVMITNEEEIKTTNPVATESYGQVATNHQSAQAQAGTGWVQNQGILPGMVWQDRDVYLQGPIWAKIPHTDGNFHPSPLMGGFGMKHPPPQILIKNTPVPADPPTAFNKDKLNSFITQYSTGQVSVEIEWELQKENSKRWNPEIQYTSNYYKSNNVEFAVNTEGVYSEPRPIGTRYLTRNL

SEQ ID NO: 277 - DNA, 2208 bp, synthetic construct
  misc_feature 1..2208: note = Adeno Associated Virus Capsid Protein Variant
  source 1..2208: mol_type = other DNA
atggctgccgatggttatcttccagattggctcgaggacaaccttagtgaaggaattcgcgagtggtgggctttgaaacctggagcccctcaacccaaggcaaatcaacaacatcaagacaacgctcgaggtcttgtgcttccgggttacaaataccttggacccggcaacggactcgacaagggggagccggtcaacgcagcagacgcggcggccctcgagcacgacaaggcctacgaccagcagctcaaggccggagacaacccgtacctcaagtacaaccacgccgacgccgagttccaggagcggctcaaagaagatacgtcttttgggggcaacctcgggcgagcagtcttccaggccaaaaagaggcttcttgaacctcttggtctggttgaggaagcggctaagacggctcctggaaagaagaggcctgtagagcagtctcctcaggaaccggactcctccgcgggtattggcaaatcgggtgcacagcccgctaaaaagagactcaatttcggtcagactggcgacacagagtcagtcccagaccctcaaccaatcggagaacctcccgcagccccctcaggtgtgggatctcttacaatggcttcaggtggtggcgcaccagtggcagacaataacgaaggtgccgatggagtgggtagttcctcgggaaattggcattgcgattcccaatggctgggggacagagtcatcaccaccagcacccgaacctgggccctgcccacctacaacaatcacctctacaagcaaatctccaacagcacatctggaggatcttcaaatgacaacgcctacttcggctacagcaccccctgggggtattttgacttcaacagattccactgccacttctcaccacgtgactggcagcgactcatcaacaacaactggggattccggcctaagcgactcaacttcaagctcttcaacattcaggtcaaagaggttacggacaacaatggagtcaagaccatcgccaataaccttaccagcacggtccaggtcttcacggactcagactatcagctcccgtacgtgctcgggtcggctcacgagggctgcctcccgccgttcccagcggacgttttcatgattcctcagtacgggtatctgacgcttaatgatggaagccaggccgtgggtcgttcgtccttttactgcctggaatatttcccgtcgcaaatgctaagaacgggtaacaacttccagttcagctacgagtttgagaacgtacctttccatagcagctacgctcacagccaaagcctggaccgactaatgaatccactcatcgaccaatacttgtactatctctcaaagactattaacggttctggacagaatcaacaaacgctaaaattcagtgtggccggacccagcaacatggctgtccagggaagaaactacatacctggacccagctaccgacaacaacgtgtctcaaccactgtgactcaaaacaacaacagcgaatttgcttggcctggagcttcttcttgggctctcaatggacgtaatagcttgatgaatcctggacctgctatggccagccacaaagaaggagaggaccgtttctttcctttgtctggatctttaatttttggcaaacaaggaactggaagagacaacgtggatgcggacaaagtcatgataaccaacgaagaagaaattaaaactactaacccggtagcaacggagtcctatggacaagtggccacaaaccaccagagtgcccgggcacaggcgcagaccggctgggttcaaaaccaaggaatacttccgggtatggtttggcaggacagagatgtgtacctgcaaggacccatttgggccaaaattcctcacacggacggcaactttcacccttctccgctgatgggagggtttggaatgaagcacccgcctcctcagatcctcatcaaaaacacacctgtacctgcggatcctccaacggccttcaacaagggcaagctgaactctttcatcacccagtattctactggccaagtcagcgtggagatcgagtgggagctgcagaaggaaaacagcaagcgctggaacccggagatccagtacacttccaactattacaagtctaataatgttgaatttgctgttaatactgaaggtgtatatagtgaaccccgccccattggcaccagatacctgactcgtaatctg

SEQ ID NO: 278 - protein, 736 aa, synthetic construct
  REGION 1..736: note = Adeno Associated Virus Capsid Protein Variant
MAADGYLPDWLEDNLSEGIREWWALKPGAPQPKANQQHQDNARGLVLPGYKYLGPGNGLDKGEPVNAADAAALEHDKAYDQQLKAGDNPYLKYNHADAEFQERLKEDTSFGGNLGRAVFQAKKRLLEPLGLVEEAAKTAPGKKRPVEQSPQEPDSSAGIGKSGAQPAKKRLNFGQTGDTESVPDPQPIGEPPAAPSGVGSLTMASGGGAPVADNNEGADGVGSSSGNWHCDSQWLGDRVITTSTRTWALPTYNNHLYKQISNSTSGGSSNDNAYFGYSTPWGYFDFNRFHCHFSPRDWQRLINNNWGFRPKRLNFKLFNIQVKEVTDNNGVKTIANNLTSTVQVFTDSDYQLPYVLGSAHEGCLPPFPADVFMIPQYGYLTLNDGSQAVGRSSFYCLEYFPSQMLRTGNNFQFSYEFENVPFHSSYAHSQSLDRLMNPLIDQYLYYLSKTINGSGQNQQTLKFSVAGPSNMAVQGRNYIPGPSYRQQRVSTTVTQNNNSEFAWPGASSWALNGRNSLMNPGPAMASHKEGEDRFFPLSGSLIFGKQGTGRDNVDADKVMITNEEEIKTTNPVATESYGQVATNHQSARAQAQTGWVQNQGILPGMVWQDRDVYLQGPIWAKIPHTDGNFHPSPLMGGFGMKHPPPQILIKNTPVPADPPTAFNKGKLNSFITQYSTGQVSVEIEWELQKENSKRWNPEIQYTSNYYKSNNVEFAVNTEGVYSEPRPIGTRYLTRNL

SEQ ID NO: 279 - DNA, 2208 bp, synthetic construct
  misc_feature 1..2208: note = Adeno Associated Virus Capsid Protein Variant
  source 1..2208: mol_type = other DNA
atggctgccgatggttatcttccagattggctcgaggacaaccttagtgaaggaattcgcgagtggtgggctttgaaacctggagcccctcaacccaaggcaaatcaacaacatcaagacaacgctcgaggtcttgtgcttccgggttacaaataccttggacccggcaacggactcgacaagggggagccggtcaacgcagcagacgcggcggccctcgagcacgacaaggcctacgaccagcagctcaaggccggagacaacccgtacctcaagtacaaccacgccgacgccgagttccaggagcggctcaaagaagatacgtcttttgggggcaacctcgggcgagcagtcttccaggccaaaaagaggcttcttgaacctcttggtctggttgaggaagcggctaagacggctcctggaaagaagaggcctgtagagcagtctcctcaggaaccggactcctccgcgggtattggcaaatcgggtgcacagcccgctaaaaagagactcaatttcggtcagactggcgacacagagtcagtcccagaccctcaaccaatcggagaacctcccgcagccccctcaggtgtgggatctcttacaatggcttcaggtggtggcgcaccagtggcagacaataacgaaggtgccgatggagtgggtagttcctcgggaaattggcattgcgattcccaatggctgggggacagagtcatcaccaccagcacccgaacctgggccctgcccacctacaacaatcacctctacaagcaaatctccaacagcacatctggaggatcttcaaatgacaacgcctacttcggctacagcaccccctgggggtattttgacttcaacagattccactgccacttctcaccacgtgactggcagcgactcatcaacaacaactggggattccggcctaagcgactcaacttcaagctcttcaacattcaggtcaaagaggttacggacaacaatggagtcaagaccatcgccaataaccttaccagcacggtccaggtcttcacggactcagactatcagctcccgtacgtgctcgggtcggctcacgagggctgcctcccgccgttcccagcggacgttttcatgattcctcagtacgggtatctgacgcttaatgatggaagccaggccgtgggtcgttcgtccttttactgcctggaatatttcccgtcgcaaatgctaagaacgggtaacaacttccagttcagctacgagtttgagaacgtacctttccatagcagctacgctcacagccaaagcctggaccgactaatgaatccactcatcgaccaatacttgtactatctctcaaagactattaacggttctggacagaatcaacaaacgctaaaattcagtgtggccggacccagcaacatggctgtccagggaagaaactacatacctggacccagctaccgacaacaacgtgtctcaaccactgtgactcaaaacaacaacagcgaatttgcttggcctggagcttcttcttgggctctcaatggacgtaatagcttgatgaatcctggacctgctatggccagccacaaagaaggagaggaccgtttctttcctttgtctggatctttaatttttggcaaacaaggaactggaagatttaacgtggatgcggacaaagtcatgataaccaacgaagaagaaattaaaactactaacccggtagcaacggagtcctatggacaagtggccacaaaccaccagagtgcccaagcacaggcgcagaccggctgggttcaaaaccaaggaatacttccgggtatggtttggcaggacagagatgtgtacctgcaaggacccatttgggccaaaattcctcacacggacggcaactttcacccttctccgctgatgggagggtttggaatgaagcacccgcctcctcagatcctcatcaaaaacacacctgtacctgcggatcctccaacggccttcaacaaggacaagctgaactctttcatcacccagtattctactggccaagtcagcgtggagatcgagtgggagctgcagaaggaaaacagcaagcgctggaacccggagatccagtacacttccaactattacaagtctaataatgttgaatttgctgttaatactgaaggtgtatatagtgaaccccgccccattggcaccagatacctgactcgtaatctg

SEQ ID NO: 280 - protein, 736 aa, synthetic construct
  REGION 1..736: note = Adeno Associated Virus Capsid Protein Variant
MAADGYLPDWLEDNLSEGIREWWALKPGAPQPKANQQHQDNARGLVLPGYKYLGPGNGLDKGEPVNAADAAALEHDKAYDQQLKAGDNPYLKYNHADAEFQERLKEDTSFGGNLGRAVFQAKKRLLEPLGLVEEAAKTAPGKKRPVEQSPQEPDSSAGIGKSGAQPAKKRLNFGQTGDTESVPDPQPIGEPPAAPSGVGSLTMASGGGAPVADNNEGADGVGSSSGNWHCDSQWLGDRVITTSTRTWALPTYNNHLYKQISNSTSGGSSNDNAYFGYSTPWGYFDFNRFHCHFSPRDWQRLINNNWGFRPKRLNFKLFNIQVKEVTDNNGVKTIANNLTSTVQVFTDSDYQLPYVLGSAHEGCLPPFPADVFMIPQYGYLTLNDGSQAVGRSSFYCLEYFPSQMLRTGNNFQFSYEFENVPFHSSYAHSQSLDRLMNPLIDQYLYYLSKTINGSGQNQQTLKFSVAGPSNMAVQGRNYIPGPSYRQQRVSTTVTQNNNSEFAWPGASSWALNGRNSLMNPGPAMASHKEGEDRFFPLSGSLIFGKQGTGRFNVDADKVMITNEEEIKTTNPVATESYGQVATNHQSAQAQAQTGWVQNQGILPGMVWQDRDVYLQGPIWAKIPHTDGNFHPSPLMGGFGMKHPPPQILIKNTPVPADPPTAFNKDKLNSFITQYSTGQVSVEIEWELQKENSKRWNPEIQYTSNYYKSNNVEFAVNTEGVYSEPRPIGTRYLTRNL

SEQ ID NO: 281 - DNA, 2208 bp, synthetic construct
  misc_feature 1..2208: note = Adeno Associated Virus Capsid Protein Variant
  source 1..2208: mol_type = other DNA
atggctgccgatggttatcttccagattggctcgaggacaaccttagtgaaggaattcgcgagtggtgggctttgaaacctggagcccctcaacccaaggcaaatcaacaacatcaagacaacgctcgaggtcttgtgcttccgggttacaaataccttggacccggcaacggactcgacaagggggagccggtcaacgcagcagacgcggcggccctcgagcacgacaaggcctacgaccagcagctcaaggccggagacaacccgtacctcaagtacaaccacgccgacgccgagttccaggagcggctcaaagaagatacgtcttttgggggcaacctcgggcgagcagtcttccaggccaaaaagaggcttcttgaacctcttggtctggttgaggaagcggctaagacggctcctggaaagaagaggcctgtagagcagtctcctcaggaaccggactcctccgcgggtattggcaaatcgggtgcacagcccgctaaaaagagactcaatttcggtcagactggcgacacagagtcagtcccagaccctcaaccaatcggagaacctcccgcagccccctcaggtgtgggatctcttacaatggcttcaggtggtggcgcaccagtggcagacaataacgaaggtgccgatggagtgggtagttcctcgggaaattggcattgcgattcccaatggctgggggacagagtcatcaccaccagcacccgaacctgggccctgcccacctacaacaatcacctctacaagcaaatctccaacagcacatctggaggatcttcaaatgacaacgcctacttcggctacagcaccccctgggggtattttgacttcaacagattccactgccacttctcaccacgtgactggcagcgactcatcaacaacaactggggattccggcctaagcgactcaacttcaagctcttcaacattcaggtcaaagaggttacggacaacaatggagtcaagaccatcgccaataaccttaccagcacggtccaggtcttcacggactcagactatcagctcccgtacgtgctcgggtcggctcacgagggctgcctcccgccgttcccagcggacgttttcatgattcctcagtacgggtatctgacgcttaatgatggaagccaggccgtgggtcgttcgtccttttactgcctggaatatttcccgtcgcaaatgctaagaacgggtaacaacttccagttcagctacgagtttgagaacgtacctttccatagcagctacgctcacagccaaagcctggaccgactaatgaatccactcatcgaccaatacttgtactatctctcaaagactattaacggttctggacagaatcaacaaacgctaaaattcagtgtcgccggacccagcaacatggctgtccagggaagaaactacattcctggacccagctaccgacaacaacgtgtctcaaccactgtgactcaaaacaacaacagcgaatttgcttggacgggagcttctagttggcatctcaatggacgtaatagcttgatgaatcctggacctgctatggccagccacaaagaaggagaggaccgtttctttcctttgtctggatctttaatttttggcaaacaaggaactggaagagacaacgtggatgcggacaaagtcatgataaccaacgaagaagaaattaaaactactaacccggtagcaacggagtcctatggacaagtggccacaaaccaccagagtgcccaagcacaggcgcagaccggctgggttcaaaaccaaggaatacttccgggtatggtttggcaggacagagatgtgtacctgcaaggacccatttgggccaaaattcctcacacggacggcaactttcacccttctccgctgatgggagggtttggaatgaagcacccgcctcctcagatcctcatcaaaaacacacctgtacctgcggatcctccaacggccttcaacaaggacaagctgaactctttcatcacccagtattctactggccaagtcagcgtggagatcgagtgggagctgcagaaggaaaacagcaagcgctggaacccggagatccagtacacttccaactattacaagtctaataatgttgaatttgctgttaatactgaaggtgtatatagtgaaccccgccccattggcaccagatacctgactcgtaatctg

SEQ ID NO: 282 - protein, 736 aa, synthetic construct
  REGION 1..736: note = Adeno Associated Virus Capsid Protein Variant
MAADGYLPDWLEDNLSEGIREWWALKPGAPQPKANQQHQDNARGLVLPGYKYLGPGNGLDKGEPVNAADAAALEHDKAYDQQLKAGDNPYLKYNHADAEFQERLKEDTSFGGNLGRAVFQAKKRLLEPLGLVEEAAKTAPGKKRPVEQSPQEPDSSAGIGKSGAQPAKKRLNFGQTGDTESVPDPQPIGEPPAAPSGVGSLTMASGGGAPVADNNEGADGVGSSSGNWHCDSQWLGDRVITTSTRTWALPTYNNHLYKQISNSTSGGSSNDNAYFGYSTPWGYFDFNRFHCHFSPRDWQRLINNNWGFRPKRLNFKLFNIQVKEVTDNNGVKTIANNLTSTVQVFTDSDYQLPYVLGSAHEGCLPPFPADVFMIPQYGYLTLNDGSQAVGRSSFYCLEYFPSQMLRTGNNFQFSYEFENVPFHSSYAHSQSLDRLMNPLIDQYLYYLSKTINGSGQNQQTLKFSVAGPSNMAVQGRNYIPGPSYRQQRVSTTVTQNNNSEFAWTGASSWHLNGRNSLMNPGPAMASHKEGEDRFFPLSGSLIFGKQGTGRDNVDADKVMITNEEEIKTTNPVATESYGQVATNHQSAQAQAQTGWVQNQGILPGMVWQDRDVYLQGPIWAKIPHTDGNFHPSPLMGGFGMKHPPPQILIKNTPVPADPPTAFNKDKLNSFITQYSTGQVSVEIEWELQKENSKRWNPEIQYTSNYYKSNNVEFAVNTEGVYSEPRPIGTRYLTRNL

SEQ ID NO: 283 - DNA, 2208 bp, synthetic construct
  misc_feature 1..2208: note = Adeno Associated Virus Capsid Protein Variant
  source 1..2208: mol_type = other DNA
atggctgccgatggttatcttccagattggctcgaggacaaccttagtgaaggaattcgcgagtggtgggctttgaaacctggagcccctcaacccaaggcaaatcaacaacatcaagacaacgctcgaggtcttgtgcttccgggttacaaataccttggacccggcaacggactcgacaagggggagccggtcaacgcagcagacgcggcggccctcgagcacgacaaggcctacgaccagcagctcaaggccggagacaacccgtacctcaagtacaaccacgccgacgccgagttccaggagcggctcaaagaagatacgtcttttgggggcaacctcgggcgagcagtcttccaggccaaaaagaggcttcttgaacctcttggtctggttgaggaagcggctaagacggctcctggaaagaagaggcctgtagagcagtctcctcaggaaccggactcctccgcgggtattggcaaatcgggtgcacagcccgctaaaaagagactcaatttcggtcagactggcgacacagagtcagtcccagaccctcaaccaatcggagaacctcccgcagccccctcaggtgtgggatctcttacaatggcttcaggtggtggcgcaccagtggcagacaataacgaaggtgccgatggagtgggtagttcctcgggaaattggcattgcgattcccaatggctgggggacagagtcatcaccaccagcacccgaacctgggccctgcccacctacaacaatcacctctacaagcaaatctccaacagcacatctggaggatcttcaaatgacaacgcctacttcggctacagcaccccctgggggtattttgacttcaacagattccactgccacttctcaccacgtgactggcagcgactcatcaacaacaactggggattccggcctaagcgactcaacttcaagctcttcaacattcaggtcaaagaggttacggacaacaatggagtcaagaccatcgccaataaccttaccagcacggtccaggtcttcacggactcagactatcagctcccgtacgtgctcgggtcggctcacgagggctgcctcccgccgttcccagcggacgttttcatgattcctcagtacgggtatctgacgcttaatgatggaagccaggccgtgggtcgttcgtccttttactgcctggaatatttcccgtcgcaaatgctaagaacgggtaacaacttccagttcagctacgagtttgagaacgtacctttccatagcagctacgctcacagccaaagcctggaccgactaatgaatccactcatcgaccaatacttgtactatctctcaaagactattaacggttctggacagaatcaacaaacgctaaaattcagtgtggccggacccagcaacatggctgtccagggaagaaactacatacctggacccagctaccgacaacaacgtgtctcaaccactgtgactcaaaacaacaacagcgaatttgcttggcctggagcttcttcttgggctctcaatggacgtaatagcttgatgaatcctggacctgctatggccagccacaaagaaggagaggaccgtttctttcctttgtctggatctttaatttttggcaaacaaggaactggaagagacaacgtggatgcggacaaagtcatgataaccaacgaagaagaaattaaaactactaacccggtagcaacggagtcctatggacaagtggccacaaaccaccagaaggcccaagcacaggcgcagaccggctgggttcaaaaccaaggaatacttccgggtatggtttggcaggacagagatgtgtacctgcaaggacccatttgggccaaaattcctcacacggacggcaactttcacccttctccgctgatgggagggtttggaatgaagcacccgcctcctcagatcctcatcaaaaacacacctgtacctgcggatcctccaacggccttcaacaaggacaagctgaactctttcatcacccagtattctactggccaagtcagcgtggagatcgagtgggagctgcagaaggaaaacagcaagcgctggaacccggagatccagtacacttccaactattacaagtctaataatgttgaatttgctgttaatactgaaggtgtatatagtgaaccccgccccattggcaccagatacctgactcgtaatctg

SEQ ID NO: 284 - protein, 736 aa, synthetic construct
  REGION 1..736: note = Adeno Associated Virus Capsid Protein Variant
MAADGYLPDWLEDNLSEGIREWWALKPGAPQPKANQQHQDNARGLVLPGYKYLGPGNGLDKGEPVNAADAAALEHDKAYDQQLKAGDNPYLKYNHADAEFQERLKEDTSFGGNLGRAVFQAKKRLLEPLGLVEEAAKTAPGKKRPVEQSPQEPDSSAGIGKSGAQPAKKRLNFGQTGDTESVPDPQPIGEPPAAPSGVGSLTMASGGGAPVADNNEGADGVGSSSGNWHCDSQWLGDRVITTSTRTWALPTYNNHLYKQISNSTSGGSSNDNAYFGYSTPWGYFDFNRFHCHFSPRDWQRLINNNWGFRPKRLNFKLFNIQVKEVTDNNGVKTIANNLTSTVQVFTDSDYQLPYVLGSAHEGCLPPFPADVFMIPQYGYLTLNDGSQAVGRSSFYCLEYFPSQMLRTGNNFQFSYEFENVPFHSSYAHSQSLDRLMNPLIDQYLYYLSKTINGSGQNQQTLKFSVAGPSNMAVQGRNYIPGPSYRQQRVSTTVTQNNNSEFAWPGASSWALNGRNSLMNPGPAMASHKEGEDRFFPLSGSLIFGKQGTGRDNVDADKVMITNEEEIKTTNPVATESYGQVATNHQKAQAQAQTGWVQNQGILPGMVWQDRDVYLQGPIWAKIPHTDGNFHPSPLMGGFGMKHPPPQILIKNTPVPADPPTAFNKDKLNSFITQYSTGQVSVEIEWELQKENSKRWNPEIQYTSNYYKSNNVEFAVNTEGVYSEPRPIGTRYLTRNL

SEQ ID NO: 285 - DNA, 2208 bp, synthetic construct
  misc_feature 1..2208: note = Adeno Associated Virus Capsid Protein Variant
  source 1..2208: mol_type = other DNA
atggctgccgatggttatcttccagattggctcgaggacaaccttagtgaaggaattcgcgagtggtgggctttgaaacctggagcccctcaacccaaggcaaatcaacaacatcaagacaacgctcgaggtcttgtgcttccgggttacaaataccttggacccggcaacggactcgacaagggggagccggtcaacgcagcagacgcggcggccctcgagcacgacaaggcctacgaccagcagctcaaggccggagacaacccgtacctcaagtacaaccacgccgacgccgagttccaggagcggctcaaagaagatacgtcttttgggggcaacctcgggcgagcagtcttccaggccaaaaagaggcttcttgaacctcttggtctggttgaggaagcggctaagacggctcctggaaagaagaggcctgtagagcagtctcctcaggaaccggactcctccgcgggtattggcaaatcgggtgcacagcccgctaaaaagagactcaatttcggtcagactggcgacacagagtcagtcccagaccctcaaccaatcggagaacctcccgcagccccctcaggtgtgggatctcttacaatggcttcaggtggtggcgcaccagtggcagacaataacgaaggtgccgatggagtgggtagttcctcgggaaattggcattgcgattcccaatggctgggggacagagtcatcaccaccagcacccgaacctgggccctgcccacctacaacaatcacctctacaagcaaatctccaacagcacatctggaggatcttcaaatgacaacgcctacttcggctacagcaccccctgggggtattttgacttcaacagattccactgccacttctcaccacgtgactggcagcgactcatcaacaacaactggggattccggcctaagcgactcaacttcaagctcttcaacattcaggtcaaagaggttacggacaacaatggagtcaagaccatcgccaataaccttaccagcacggtccaggtcttcacggactcagactatcagctcccgtacgtgctcgggtcggctcacgagggctgcctcccgccgttcccagcggacgttttcatgattcctcagtacgggtatctgacgcttaatgatggaagccaggccgtgggtcgttcgtccttttactgcctggaatatttcccgtcgcaaatgctaagaacgggtaacaacttccagttcagctacgagtttgagaacgtacctttccatagcagctacgctcacagccaaagcctggaccgactaatgaatccactcatcgaccaatacttgtactatctctcaaagactattaacggttctggacagaatcaacaaacgctaaaattcagtgtggccggacccagcaacatggctgtccagggaagaaactacatacctggacccagctaccgacaacaacgtgtctcaaccactgtgactcaaaacaacaacagcgaatttgcttggcctggagcttcttcttgggctctcaatggacgtaatagcttgatgaatcctggacctgctatggccagccacaaagaaggagaggaccgtttctttcctttgtctggatctttaatttttggcaaacaaggaactggaagagacaacgtggatgcggacaaagtcatgataaccaacgaagaagaaattaaaactactaacccggtagcaacggagtcctatggacaagtggccacaaaccaccagagtgcccaagcacaggcgcagaccggctgggttcaaaaccaaggaatacttccgggtatggtttggcaggacagagatgtgtacctgcaaggacccatttgggccaaaattcctcacacggacggcaactttcacccttctccgctgatgggagggtttggaatgaagcacccgcctcctcagatcctcatcaaaaacacacctgtacctgcggatcctccaacggccttcaacaaggacaagctgaactctttcatcacccagtattctactggccaagtcagcgtggagatcgagtgggagctgcagaaggaaaacagcaagcgctggaacccggagatccagtacacttccaactattacaagtctaatggtgttgaatttgctgttaatactgaaggtgtatatagtgaaccccgccccattggcaccagatacctgactcgtaatctg

SEQ ID NO: 286 - protein, 736 aa, synthetic construct
  REGION 1..736: note = Adeno Associated Virus Capsid Protein Variant
MAADGYLPDWLEDNLSEGIREWWALKPGAPQPKANQQHQDNARGLVLPGYKYLGPGNGLDKGEPVNAADAAALEHDKAYDQQLKAGDNPYLKYNHADAEFQERLKEDTSFGGNLGRAVFQAKKRLLEPLGLVEEAAKTAPGKKRPVEQSPQEPDSSAGIGKSGAQPAKKRLNFGQTGDTESVPDPQPIGEPPAAPSGVGSLTMASGGGAPVADNNEGADGVGSSSGNWHCDSQWLGDRVITTSTRTWALPTYNNHLYKQISNSTSGGSSNDNAYFGYSTPWGYFDFNRFHCHFSPRDWQRLINNNWGFRPKRLNFKLFNIQVKEVTDNNGVKTIANNLTSTVQVFTDSDYQLPYVLGSAHEGCLPPFPADVFMIPQYGYLTLNDGSQAVGRSSFYCLEYFPSQMLRTGNNFQFSYEFENVPFHSSYAHSQSLDRLMNPLIDQYLYYLSKTINGSGQNQQTLKFSVAGPSNMAVQGRNYIPGPSYRQQRVSTTVTQNNNSEFAWPGASSWALNGRNSLMNPGPAMASHKEGEDRFFPLSGSLIFGKQGTGRDNVDADKVMITNEEEIKTTNPVATESYGQVATNHQSAQAQAQTGWVQNQGILPGMVWQDRDVYLQGPIWAKIPHTDGNFHPSPLMGGFGMKHPPPQILIKNTPVPADPPTAFNKDKLNSFITQYSTGQVSVEIEWELQKENSKRWNPEIQYTSNYYKSNGVEFAVNTEGVYSEPRPIGTRYLTRNL

SEQ ID NO: 287 - DNA, 2208 bp, synthetic construct
  misc_feature 1..2208: note = Adeno Associated Virus Capsid Protein Variant
  source 1..2208: mol_type = other DNA
atggctgccgatggttatcttccagattggctcgaggacaaccttagtgaaggaattcgcgagtggtgggctttgaaacctggagcccctcaacccaaggcaaatcaacaacatcaagacaacgctcgaggtcttgtgcttccgggttacaaataccttggacccggcaacggactcgacaagggggagccggtcaacgcagcagacgcggcggccctcgagcacgacaaggcctacgaccagcagctcaaggccggagacaacccgtacctcaagtacaaccacgccgacgccgagttccaggagcggctcaaagaagatacgtcttttgggggcaacctcgggcgagcagtcttccaggccaaaaagaggcttcttgaacctcttggtctggttgaggaagcggctaagacggctcctggaaagaagaggcctgtagagcagtctcctcaggaaccggactcctccgcgggtattggcaaatcgggtgcacagcccgctaaaaagagactcaatttcggtcagactggcgacacagagtcagtcccagaccctcaaccaatcggagaacctcccgcagccccctcaggtgtgggatctcttacaatggcttcaggtggtggcgcaccagtggcagacaataacgaaggtgccgatggagtgggtagttcctcgggaaattggcattgcgattcccaatggctgggggacagagtcatcaccaccagcacccgaacctgggccctgcccacctacaacaatcacctctacaagcaaatctccaacagcacatctggaggatcttcaaatgacaacgcctacttcggctacagcaccccctgggggtattttgacttcaacagattccactgccacttctcaccacgtgactggcagcgactcatcaacaacaactggggattccggcctaagcgactcaacttcaagctcttcaacattcaggtcaaagaggttacggacaacaatggagtcaagaccatcgccaataaccttaccagcacggtccaggtcttcacggactcagactatcagctcccgtacgtgctcgggtcggctcacgagggctgcctcccgccgttcccagcggacgttttcatgattcctcagtacgggtatctgacgcttaatgatggaagccaggccgtgggtcgttcgtccttttactgcctggaatatttcccgtcgcaaatgctaagaacgggtaacaacttccagttcagctacgagtttgagaacgtacctttccatagcagctacgctcacagccaaagcctggaccgactaatgaatccactcatcgaccaatacttgtactatctctcaaagactattaacggttctcggcagaatcaacaaacgctaaaattcagtgtggccggacccagcaacatggctgtccagggaagaaactacatacctggacccagctaccgacaacaacgtgtctcaaccactgtgactcaaaacaacaacagcgaatttgcttggcctggagcttcttcttgggctctcaatggacgtaatagcttgatgaatcctggacctgctatggccagccacaaagaaggagaggaccgtttctttcctttgtctggatctttaatttttggcaaacaaggaactggaagagacaacgtggatgcggacaaagtcatgataaccaacgaagaagaaattaaaactactaacccggtagcaacggagtcctatggacaagtggccacaaaccaccagagtgcccaagcacaggcgcagaccggctgggttcaaaaccaaggaatacttccgggtatggtttggcaggacagagatgtgtacctgcaaggacccatttgggccaaaattcctcacacggacggcaactttcacccttctccgctgatgggagggtttggaatgaagcacccgcctcctcagatcctcatcaaaaacacacctgtacctgcggatcctccaacggccttcaacaaggacaagctgaactctttcatcacccagtattctactggccaagtcagcgtggagatcgagtgggagctgcagaaggaaaacagcaagcgctggaacccggagatccagtacacttccaactattacaagtctaataatgttgaatttgctgttaatactgaaggtgtatatagtgaaccccgccccattggcaccagatacctgactcgtaatctg

SEQ ID NO: 288 - protein, 736 aa, synthetic construct
  REGION 1..736: note = Adeno Associated Virus Capsid Protein Variant
MAADGYLPDWLEDNLSEGIREWWALKPGAPQPKANQQHQDNARGLVLPGYKYLGPGNGLDKGEPVNAADAAALEHDKAYDQQLKAGDNPYLKYNHADAEFQERLKEDTSFGGNLGRAVFQAKKRLLEPLGLVEEAAKTAPGKKRPVEQSPQEPDSSAGIGKSGAQPAKKRLNFGQTGDTESVPDPQPIGEPPAAPSGVGSLTMASGGGAPVADNNEGADGVGSSSGNWHCDSQWLGDRVITTSTRTWALPTYNNHLYKQISNSTSGGSSNDNAYFGYSTPWGYFDFNRFHCHFSPRDWQRLINNNWGFRPKRLNFKLFNIQVKEVTDNNGVKTIANNLTSTVQVFTDSDYQLPYVLGSAHEGCLPPFPADVFMIPQYGYLTLNDGSQAVGRSSFYCLEYFPSQMLRTGNNFQFSYEFENVPFHSSYAHSQSLDRLMNPLIDQYLYYLSKTINGSRQNQQTLKFSVAGPSNMAVQGRNYIPGPSYRQQRVSTTVTQNNNSEFAWPGASSWALNGRNSLMNPGPAMASHKEGEDRFFPLSGSLIFGKQGTGRDNVDADKVMITNEEEIKTTNPVATESYGQVATNHQSAQAQAQTGWVQNQGILPGMVWQDRDVYLQGPIWAKIPHTDGNFHPSPLMGGFGMKHPPPQILIKNTPVPADPPTAFNKDKLNSFITQYSTGQVSVEIEWELQKENSKRWNPEIQYTSNYYKSNNVEFAVNTEGVYSEPRPIGTRYLTRNL

SEQ ID NO: 289 - DNA, 2208 bp, synthetic construct
  misc_feature 1..2208: note = Adeno Associated Virus Capsid Protein Variant
  source 1..2208: mol_type = other DNA
atggctgccgatggttatcttccagattggctcgaggacaaccttagtgaaggaattcgcgagtggtgggctttgaaacctggagcccctcaacccaaggcaaatcaacaacatcaagacaacgctcgaggtcttgtgcttccgggttacaaataccttggacccggcaacggactcgacaagggggagccggtcaacgcagcagacgcggcggccctcgagcacgacaaggcctacgaccagcagctcaaggccggagacaacccgtacctcaagtacaaccacgccgacgccgagttccaggagcggctcaaagaagatacgtcttttgggggcaacctcgggcgagcagtcttccaggccaaaaagaggcttcttgaacctcttggtctggttgaggaagcggctaagacggctcctggaaagaagaggcctgtagagcagtctcctcaggaaccggactcctccgcgggtattggcaaatcgggtgcacagcccgctaaaaagagactcaatttcggtcagactggcgacacagagtcagtcccagaccctcaaccaatcggagaacctcccgcagccccctcaggtgtgggatctcttacaatggcttcaggtggtggcgcaccagtggcagacaataacgaaggtgccgatggagtgggtagttcctcgggaaattggcattgcgattcccaatggctgggggacagagtcatcaccaccagcacccgaacctgggccctgcccacctacaacaatcacctctacaagcaaatctccaacagcacatctggaggatcttcaaatgacaacgcctacttcggctacagcaccccctgggggtattttgacttcaacagattccactgccacttctcaccacgtgactggcagcgactcatcaacaacaactggggattccggcctaagcgactcaacttcaagctcttcaacattcaggtcaaagaggttacggacaacaatggagtcaagaccatcgccaataaccttaccagcacggtccaggtcttcacggactcagactatcagctcccgtacgtgctcgggtcggctcacgagggctgcctcccgccgttcccagcggacgttttcatgattcctcagtacgggtatctgacgcttaatgatggaagccaggccgtgggtcgttcgtccttttactgcctggaatatttcccgtcgcaaatgctaagaacgggtaacaacttccagttcagctacgagtttgagaacgtacctttccatagcagctacgctcacagccaaagcctggaccgactaatgaatccactcatcgaccaatacttgtactatctctcaaagactattaacggttctggacagaatcaacaaacgctaaaattcagtgtggccggacccagcaacatggctgtccagggaagaaactacatacctggacccagctaccgacaacaacgtgtctcaaccactgtgactcaaaacaacaacagcgaatttgcttggcctggagcttcttcttgggctctcaatggacgtaatagcttgatgaatcctggacctgctatggccagccacaaagaaggagaggaccgtttctttcctttgtctggatctttaatttttggcaaacaaggaactggaagaatgaacgtggatgcggacaaagtcatgataaccaacgaagaagaaattaaaactactaacccggtagcaacggagtcctatggacaagtggccacaaaccaccagagtgcccaagcacaggcgcagaccggctgggttcaaaaccaaggaatacttccgggtatggtttggcaggacagagatgtgtacctgcaaggacccatttgggccaaaattcctcacacggacggcaactttcacccttctccgctgatgggagggtttggaatgaagcacccgcctcctcagatcctcatcaaaaacacacctgtacctgcggatcctccaacggccttcaacaaggacaagctgaactctttcatcacccagtattctactggccaagtcagcgtggagatcgagtgggagctgcagaaggaaaacagcaagcgctggaacccggagatccagtacacttccaactattacaagtctaataatgttgaatttgctgttaatactgaaggtgtatatagtgaaccccgccccattggcaccagatacctgactcgtaatctg

SEQ ID NO: 290 - protein, 736 aa, synthetic construct
  REGION 1..736: note = Adeno Associated Virus Capsid Protein Variant
MAADGYLPDWLEDNLSEGIREWWALKPGAPQPKANQQHQDNARGLVLPGYKYLGPGNGLDKGEPVNAADAAALEHDKAYDQQLKAGDNPYLKYNHADAEFQERLKEDTSFGGNLGRAVFQAKKRLLEPLGLVEEAAKTAPGKKRPVEQSPQEPDSSAGIGKSGAQPAKKRLNFGQTGDTESVPDPQPIGEPPAAPSGVGSLTMASGGGAPVADNNEGADGVGSSSGNWHCDSQWLGDRVITTSTRTWALPTYNNHLYKQISNSTSGGSSNDNAYFGYSTPWGYFDFNRFHCHFSPRDWQRLINNNWGFRPKRLNFKLFNIQVKEVTDNNGVKTIANNLTSTVQVFTDSDYQLPYVLGSAHEGCLPPFPADVFMIPQYGYLTLNDGSQAVGRSSFYCLEYFPSQMLRTGNNFQFSYEFENVPFHSSYAHSQSLDRLMNPLIDQYLYYLSKTINGSGQNQQTLKFSVAGPSNMAVQGRNYIPGPSYRQQRVSTTVTQNNNSEFAWPGASSWALNGRNSLMNPGPAMASHKEGEDRFFPLSGSLIFGKQGTGRMNVDADKVMITNEEEIKTTNPVATESYGQVATNHQSAQAQAQTGWVQNQGILPGMVWQDRDVYLQGPIWAKIPHTDGNFHPSPLMGGFGMKHPPPQILIKNTPVPADPPTAFNKDKLNSFITQYSTGQVSVEIEWELQKENSKRWNPEIQYTSNYYKSNNVEFAVNTEGVYSEPRPIGTRYLTRNL

SEQ ID NO: 291 - DNA, 2208 bp, synthetic construct
  misc_feature 1..2208: note = Adeno Associated Virus Capsid Protein Variant
  source 1..2208: mol_type = other DNA
atggctgccgatggttatcttccagattggctcgaggacaaccttagtgaaggaattcgcgagtggtgggctttgaaacctggagcccctcaacccaaggcaaatcaacaacatcaagacaacgctcgaggtcttgtgcttccgggttacaaataccttggacccggcaacggactcgacaagggggagccggtcaacgcagcagacgcggcggccctcgagcacgacaaggcctacgaccagcagctcaaggccggagacaacccgtacctcaagtacaaccacgccgacgccgagttccaggagcggctcaaagaagatacgtcttttgggggcaacctcgggcgagcagtcttccaggccaaaaagaggcttcttgaacctcttggtctggttgaggaagcggctaagacggctcctggaaagaagaggcctgtagagcagtctcctcaggaaccggactcctccgcgggtattggcaaatcgggtgcacagcccgctaaaaagagactcaatttcggtcagactggcgacacagagtcagtcccagaccctcaaccaatcggagaacctcccgcagccccctcaggtgtgggatctcttacaatggcttcaggtggtggcgcaccagtggcagacaataacgaaggtgccgatggagtgggtagttcctcgggaaattggcattgcgattcccaatggctgggggacagagtcatcaccaccagcacccgaacctgggccctgcccacctacaacaatcacctctacaagcaaatctccaacagcacatctggaggatcttcaaatgacaacgcctacttcggctacagcaccccctgggggtattttgacttcaacagattccactgccacttctcaccacgtgactggcagcgactcatcaacaacaactggggattccggcctaagcgactcaacttcaagctcttcaacattcaggtcaaagaggttacggacaacaatggagtcaagaccatcgccaataaccttaccagcacggtccaggtcttcacggactcagactatcagctcccgtacgtgctcgggtcggctcacgagggctgcctcccgccgttcccagcggacgttttcatgattcctcagtacgggtatctgacgcttaatgacggaagccaggccgtgggtcgttcgtccttttactgcctggaatatttcccgtcgcaaatgctaagaacgggtaacaacttccagttcagctacgagtttgagaacgtacctttccatagcagctacgctcacagccaaagcctggaccgactaatgaatccactcatcgaccaatacttgtactatctctcaaagactattaacggttctggacagaatcaacaaacgctaaaattcagtgtggccggacccagcaacatggctgtccagggaagaaactacatacctggacccagctaccgacaacaacgtgtctcaaccactgtgactcaaaacaacaacagcgaatttgcttggccgggagcttctaagtgggctctcaatggacgtaatagcttgatgaatcctggacctgctatggccagccacaaagaaggagaggaccgtttctttcctttgtctggatctttaatttttggcaaacaaggaactggaagagacaacgtggatgcggacaaagtcatgataaccaacgaagaagaaattaaaactactaacccggtagcaacggagtcctatggacaagtggccacaaaccaccagagtgcccaagctcaggcgcagaccggctgggttcaaaaccaaggaatacttccgggtatggtttggcaggacagagatgtgtacctgcaaggacccatttgggccaaaattcctcacacggacggcaactttcacccttctccgctgatgggagggtttggaatgaagcacccgcctcctcagatcctcatcaaaaacacacctgtacctgcggatcctccaacggccttcaacaaggacaagctgaactctttcatcacccagtattctactggccaagtcagcgtggagatcgagtgggagctgcagaaggaaaacagcaagcgctggaacccggagatccagtacacttccaactattacaagtctaataatgttgaatttgctgttaatactgaaggtgtatatagtgaaccccgccccattggcaccagatacctgactcgtaatctg

SEQ ID NO: 292 - protein, 736 aa, synthetic construct
  REGION 1..736: note = Adeno Associated Virus Capsid Protein Variant
MAADGYLPDWLEDNLSEGIREWWALKPGAPQPKANQQHQDNARGLVLPGYKYLGPGNGLDKGEPVNAADAAALEHDKAYDQQLKAGDNPYLKYNHADAEFQERLKEDTSFGGNLGRAVFQAKKRLLEPLGLVEEAAKTAPGKKRPVEQSPQEPDSSAGIGKSGAQPAKKRLNFGQTGDTESVPDPQPIGEPPAAPSGVGSLTMASGGGAPVADNNEGADGVGSSSGNWHCDSQWLGDRVITTSTRTWALPTYNNHLYKQISNSTSGGSSNDNAYFGYSTPWGYFDFNRFHCHFSPRDWQRLINNNWGFRPKRLNFKLFNIQVKEVTDNNGVKTIANNLTSTVQVFTDSDYQLPYVLGSAHEGCLPPFPADVFMIPQYGYLTLNDGSQAVGRSSFYCLEYFPSQMLRTGNNFQFSYEFENVPFHSSYAHSQSLDRLMNPLIDQYLYYLSKTINGSGQNQQTLKFSVAGPSNMAVQGRNYIPGPSYRQQRVSTTVTQNNNSEFAWPGASKWALNGRNSLMNPGPAMASHKEGEDRFFPLSGSLIFGKQGTGRDNVDADKVMITNEEEIKTTNPVATESYGQVATNHQSAQAQAQTGWVQNQGILPGMVWQDRDVYLQGPIWAKIPHTDGNFHPSPLMGGFGMKHPPPQILIKNTPVPADPPTAFNKDKLNSFITQYSTGQVSVEIEWELQKENSKRWNPEIQYTSNYYKSNNVEFAVNTEGVYSEPRPIGTRYLTRNL

SEQ ID NO: 293 - DNA, 2208 bp, synthetic construct
  misc_feature 1..2208: note = Adeno Associated Virus Capsid Protein Variant
  source 1..2208: mol_type = other DNA
atggctgccgatggttatcttccagattggctcgaggacaaccttagtgaaggaattcgcgagtggtgggctttgaaacctggagcccctcaacccaaggcaaatcaacaacatcaagacaacgctcgaggtcttgtgcttccgggttacaaataccttggacccggcaacggactcgacaagggggagccggtcaacgcagcagacgcggcggccctcgagcacgacaaggcctacgaccagcagctcaaggccggagacaacccgtacctcaagtacaaccacgccgacgccgagttccaggagcggctcaaagaagatacgtcttttgggggcaacctcgggcgagcagtcttccaggccaaaaagaggcttcttgaacctcttggtctggttgaggaagcggctaagacggctcctggaaagaagaggcctgtagagcagtctcctcaggaaccggactcctccgcgggtattggcaaatcgggtgcacagcccgctaaaaagagactcaatttcggtcagactggcgacacagagtcagtcccagaccctcaaccaatcggagaacctcccgcagccccctcaggtgtgggatctcttacaatggcttcaggtggtggcgcaccagtggcagacaataacgaaggtgccgatggagtgggtagttcctcgggaaattggcattgcgattcccaatggctgggggacagagtcatcaccaccagcacccgaacctgggccctgcccacctacaacaatcacctctacaagcaaatctccaacagcacatctggaggatcttcaaatgacaacgcctacttcggctacagcaccccctgggggtattttgacttcaacagattccactgccacttctcaccacgtgactggcagcgactcatcaacaacaactggggattccggcctaagcgactcaacttcaagctcttcaacattcaggtcaaagaggttacggacaacaatggagtcaagaccatcgccaataaccttaccagcacggtccaggtcttcacggactcagactatcagctcccgtacgtgctcgggtcggctcacgagggctgcctcccgccgttcccagcggacgttttcatgattcctcagtacgggtatctgacgcttaatgatggaagccaggccgtgggtcgttcgtccttttactgcctggaatatttcccgtcgcaaatgctaagaacgggtaacaacttccagttcagctacgagtttgagaacgtacctttccatagcagctacgctcacagccaaagcctggaccgactaatgaatccactcatcgaccaatacttgtactatctctcaaagactattaacggttctggacagtttcaacaaacgctaaaattcagtgtggccggacccagcaacatggctgtccagggaagaaactacatacctggacccagctaccgacaacaacgtgtctcaaccactgtgactcaaaacaacaacagcgaatttgcttggcctggagcttcttcttgggctctcaatggacgtaatagcttgatgaatcctggacctgctatggccagccacaaagaaggagaggaccgtttctttcctttgtctggatctttaatttttggcaaacaaggaactggaagagacaacgtggatgcggacaaagtcatgataaccaacgaagaagaaattaaaactactaacccggtagcaacggagtcctatggacaagtggccacaaaccaccagagtgcccaagcacaggcgcagaccggctgggttcaaaaccaaggaatacttccgggtatggtttggcaggacagagatgtgtacctgcaaggacccatttgggccaaaattcctcacacggacggcaactttcacccttctccgctgatgggagggtttggaatgaagcacccgcctcctcagatcctcatcaaaaacacacctgtacctgcggatcctccaacggccttcaacaaggacaagctgaactctttcatcacccagtattctactggccaagtcagcgtggagatcgagtgggagctgcagaaggaaaacagcaagcgctggaacccggagatccagtacacttccaactattacaagtctaataatgttgaatttgctgttaatactgaaggtgtatatagtgaaccccgccccattggcaccagatacctgactcgtaatctg

SEQ ID NO: 294 - protein, 736 aa, synthetic construct
  REGION 1..736: note = Adeno Associated Virus Capsid Protein Variant
MAADGYLPDWLEDNLSEGIREWWALKPGAPQPKANQQHQDNARGLVLPGYKYLGPGNGLDKGEPVNAADAAALEHDKAYDQQLKAGDNPYLKYNHADAEFQERLKEDTSFGGNLGRAVFQAKKRLLEPLGLVEEAAKTAPGKKRPVEQSPQEPDSSAGIGKSGAQPAKKRLNFGQTGDTESVPDPQPIGEPPAAPSGVGSLTMASGGGAPVADNNEGADGVGSSSGNWHCDSQWLGDRVITTSTRTWALPTYNNHLYKQISNSTSGGSSNDNAYFGYSTPWGYFDFNRFHCHFSPRDWQRLINNNWGFRPKRLNFKLFNIQVKEVTDNNGVKTIANNLTSTVQVFTDSDYQLPYVLGSAHEGCLPPFPADVFMIPQYGYLTLNDGSQAVGRSSFYCLEYFPSQMLRTGNNFQFSYEFENVPFHSSYAHSQSLDRLMNPLIDQYLYYLSKTINGSGQFQQTLKFSVAGPSNMAVQGRNYIPGPSYRQQRVSTTVTQNNNSEFAWPGASSWALNGRNSLMNPGPAMASHKEGEDRFFPLSGSLIFGKQGTGRDNVDADKVMITNEEEIKTTNPVATESYGQVATNHQSAQAQAQTGWVQNQGILPGMVWQDRDVYLQGPIWAKIPHTDGNFHPSPLMGGFGMKHPPPQILIKNTPVPADPPTAFNKDKLNSFITQYSTGQVSVEIEWELQKENSKRWNPEIQYTSNYYKSNNVEFAVNTEGVYSEPRPIGTRYLTRNL

SEQ ID NO: 295 - DNA, 2208 bp, synthetic construct
  misc_feature 1..2208: note = Adeno Associated Virus Capsid Protein Variant
  source 1..2208: mol_type = other DNA
atggctgccgatggttatcttccagattggctcgaggacaaccttagtgaaggaattcgcgagtggtgggctttgaaacctggagcccctcaacccaaggcaaatcaacaacatcaagacaacgctcgaggtcttgtgcttccgggttacaaataccttggacccggcaacggactcgacaagggggagccggtcaacgcagcagacgcggcggccctcgagcacgacaaggcctacgaccagcagctcaaggccggagacaacccgtacctcaagtacaaccacgccgacgccgagttccaggagcggctcaaagaagatacgtcttttgggggcaacctcgggcgagcagtcttccaggccaaaaagaggcttcttgaacctcttggtctggttgaggaagcggctaagacggctcctggaaagaagaggcctgtagagcagtctcctcaggaaccggactcctccgcgggtattggcaaatcgggtgcacagcccgctaaaaagagactcaatttcggtcagactggcgacacagagtcagtcccagaccctcaaccaatcggagaacctcccgcagccccctcaggtgtgggatctcttacaatggcttcaggtggtggcgcaccagtggcagacaataacgaaggtgccgatggagtgggtagttcctcgggaaattggcattgcgattcccaatggctgggggacagagtcatcaccaccagcacccgaacctgggccctgcccacctacaacaatcacctctacaagcaaatctccaacagcacatctggaggatcttcaaatgacaacgcctacttcggctacagcaccccctgggggtattttgacttcaacagattccactgccacttctcaccacgtgactggcagcgactcatcaacaacaactggggattccggcctaagcgactcaacttcaagctcttcaacattcaggtcaaagaggttacggacaacaatggagtcaagaccatcgccaataaccttaccagcacggtccaggtcttcacggactcagactatcagctcccgtacgtgctcgggtcggctcacgagggctgcctcccgccgttcccagcggacgttttcatgattcctcagtacgggtatctgacgcttaatgatggaagccaggccgtgggtcgttcgtccttttactgcctggaatatttcccgtcgcaaatgctaagaacgggtaacaacttccagttcagctacgagtttgagaacgtacctttccatagcagctacgctcacagccaaagcctggaccgactaatgaatccactcatcgaccaatacttgtactatctctcaaagactattaacggttctggacagaatcaacaaacgctaaaattcagtcaagccggacccagcaacatggctgtccagggaagaaactacatacctggacccagctaccgacaacaacgtgtctcaaccactgtgactcaaaacaacaacagcgaatttgcttggcctggagcttcttcttgggctctcaatggacgtaatagcttgatgaatcctggacctgctatggccagccacaaagaaggagaggaccgtttctttcctttgtctggatctttaatttttggcaaacaaggaactggaagagacaacgtggatgcggacaaagtcatgataaccaacgaagaagaaattaaaactactaacccggtagcaacggagtcctatggacaagtggccacaaaccaccagagtgcccaaactcaggcgcagaccggctgggttcaaaaccaaggaatacttccgggtatggtttggcaggacagagatgtgtacctgcaaggacccatttgggccaaaattcctcacacggacggcaactttcacccttctccgctgatgggagggtttggactgaagcacccgcctcctcagatcctcatcaaaaacacacctgtacctgcggatcctccaacggccttcaacaaggacaagctgaactctttcatcacccagtattctactggccaagtcagcgtggagatcgagtgggagctgcagaaggaaaacagcaagcgctggaacccggagatccagtacacttccaactattacaagtctaataatgttgaatttgctgttaatactgaaggtgtatatagtgaaccccgccccattggcaccagatacctgactcgtaatctg

SEQ ID NO: 296 - protein, 736 aa, synthetic construct
  REGION 1..736: note = Adeno Associated Virus Capsid Protein Variant
MAADGYLPDWLEDNLSEGIREWWALKPGAPQPKANQQHQDNARGLVLPGYKYLGPGNGLDKGEPVNAADAAALEHDKAYDQQLKAGDNPYLKYNHADAEFQERLKEDTSFGGNLGRAVFQAKKRLLEPLGLVEEAAKTAPGKKRPVEQSPQEPDSSAGIGKSGAQPAKKRLNFGQTGDTESVPDPQPIGEPPAAPSGVGSLTMASGGGAPVADNNEGADGVGSSSGNWHCDSQWLGDRVITTSTRTWALPTYNNHLYKQISNSTSGGSSNDNAYFGYSTPWGYFDFNRFHCHFSPRDWQRLINNNWGFRPKRLNFKLFNIQVKEVTDNNGVKTIANNLTSTVQVFTDSDYQLPYVLGSAHEGCLPPFPADVFMIPQYGYLTLNDGSQAVGRSSFYCLEYFPSQMLRTGNNFQFSYEFENVPFHSSYAHSQSLDRLMNPLIDQYLYYLSKTINGSGQNQQTLKFSQAGPSNMAVQGRNYIPGPSYRQQRVSTTVTQNNNSEFAWPGASSWALNGRNSLMNPGPAMASHKEGEDRFFPLSGSLIFGKQGTGRDNVDADKVMITNEEEIKTTNPVATESYGQVATNHQSAQTQAQTGWVQNQGILPGMVWQDRDVYLQGPIWAKIPHTDGNFHPSPLMGGFGLKHPPPQILIKNTPVPADPPTAFNKDKLNSFITQYSTGQVSVEIEWELQKENSKRWNPEIQYTSNYYKSNNVEFAVNTEGVYSEPRPIGTRYLTRNL

SEQ ID NO: 297 - DNA, 2208 bp, synthetic construct
  misc_feature 1..2208: note = Adeno Associated Virus Capsid Protein Variant
  source 1..2208: mol_type = other DNA
atggctgccgatggttatcttccagattggctcgaggacaaccttagtgaaggaattcgcgagtggtgggctttgaaacctggagcccctcaacccaaggcaaatcaacaacatcaagacaacgctcgaggtcttgtgcttccgggttacaaataccttggacccggcaacggactcgacaagggggagccggtcaacgcagcagacgcggcggccctcgagcacgacaaggcctacgaccagcagctcaaggccggagacaacccgtacctcaagtacaaccacgccgacgccgagttccaggagcggctcaaagaagatacgtcttttgggggcaacctcgggcgagcagtcttccaggccaaaaagaggcttcttgaacctcttggtctggttgaggaagcggctaagacggctcctggaaagaagaggcctgtagagcagtctcctcaggaaccggactcctccgcgggtattggcaaatcgggtgcacagcccgctaaaaagagactcaatttcggtcagactggcgacacagagtcagtcccagaccctcaaccaatcggagaacctcccgcagccccctcaggtgtgggatctcttacaatggcttcaggtggtggcgcaccagtggcagacaataacgaaggtgccgatggagtgggtagttcctcgggaaattggcattgcgattcccaatggctgggggacagagtcatcaccaccagcacccgaacctgggccctgcccacctacaacaatcacctctacaagcaaatctccaacagcacatctggaggatcttcaaatgacaacgcctacttcggctacagcaccccctgggggtattttgacttcaacagattccactgccacttctcaccacgtgactggcagcgactcatcaacaacaactggggattccggcctaagcgactcaacttcaagctcttcaacattcaggtcaaagaggttacggacaacaatggagtcaagaccatcgccaataaccttaccagcacggtccaggtcttcacggactcagactatcagctcccgtacgtgctcgggtcggctcacgagggctgcctcccgccgttcccagcggacgttttcatgattcctcagtacgggtatctgacgcttaatgatggaagccaggccgtgggtcgttcgtccttttactgcctggaatatttcccgtcgcaaatgctaagaacgggtaacaacttccagttcagctacgagtttgagaacgtacctttccatagcagctacgctcacagccaaagcctggaccgactaatgaatccactcatcgaccaatacttgtactatctctcaaagactattaacggttctggacagaatcaacaaacgctaaaattcagtgtggccggacccagcaacatggctgtccagggaagaaactacatacctggacccagctaccgacaacaacgtgtctcaaccactgtgactcaaaactcgaacagcgaatttgcttggcctggagcttcttcttgggctctcaatggacgtaatagcttgatgaatcctggacctgctatggccagccacaaagaaggagaggaccgtttctttcctttgtctggatctttaatttttggcaaacaaggaactggaagagacaacgtggatgcggacaaagtcatgataaccaacgaagaagaaattaaaactactaacccggtagcaacggagtcctatggacaagtggccacaaaccaccagagtgcccaagcacaggcgcagaccggctgggttcaaaaccaaggaatacttccgggtatggtttggcaggacagagatgtgtacctgcaaggacccatttgggccaaaattcctcacacggacggcaactttcacccttctccgctgatgggagggtttggaatgaagcacccgcctcctcagatcctcatcaaaaacacacctgtacctgcggatcctccaacggccttcaacaaggacaagctgaactctttcatcacccagtattctactggccaagtcagcgtggagatcgagtgggagctgcagaaggaaaacagcaagcgctggaacccggagatccagtacacttccaactattacaagtctaataatgttgaatttgctgttaatactgaaggtgtatatagtgaaccccgccccattggcaccagatacctgactcgtaatctg

SEQ ID NO: 298 - protein, 736 aa, synthetic construct
  REGION 1..736: note = Adeno Associated Virus Capsid Protein Variant
MAADGYLPDWLEDNLSEGIREWWALKPGAPQPKANQQHQDNARGLVLPGYKYLGPGNGLDKGEPVNAADAAALEHDKAYDQQLKAGDNPYLKYNHADAEFQERLKEDTSFGGNLGRAVFQAKKRLLEPLGLVEEAAKTAPGKKRPVEQSPQEPDSSAGIGKSGAQPAKKRLNFGQTGDTESVPDPQPIGEPPAAPSGVGSLTMASGGGAPVADNNEGADGVGSSSGNWHCDSQWLGDRVITTSTRTWALPTYNNHLYKQISNSTSGGSSNDNAYFGYSTPWGYFDFNRFHCHFSPRDWQRLINNNWGFRPKRLNFKLFNIQVKEVTDNNGVKTIANNLTSTVQVFTDSDYQLPYVLGSAHEGCLPPFPADVFMIPQYGYLTLNDGSQAVGRSSFYCLEYFPSQMLRTGNNFQFSYEFENVPFHSSYAHSQSLDRLMNPLIDQYLYYLSKTINGSGQNQQTLKFSVAGPSNMAVQGRNYIPGPSYRQQRVSTTVTQNSNSEFAWPGASSWALNGRNSLMNPGPAMASHKEGEDRFFPLSGSLIFGKQGTGRDNVDADKVMITNEEEIKTTNPVATESYGQVATNHQSAQAQAQTGWVQNQGILPGMVWQDRDVYLQGPIWAKIPHTDGNFHPSPLMGGFGMKHPPPQILIKNTPVPADPPTAFNKDKLNSFITQYSTGQVSVEIEWELQKENSKRWNPEIQYTSNYYKSNNVEFAVNTEGVYSEPRPIGTRYLTRNL

SEQ ID NO: 299 - DNA, 2208 bp, synthetic construct
  misc_feature 1..2208: note = Adeno Associated Virus Capsid Protein Variant
  source 1..2208: mol_type = other DNA
atggctgccgatggttatcttccagattggctcgaggacaaccttagtgaaggaattcgcgagtggtgggctttgaaacctggagcccctcaacccaaggcaaatcaacaacatcaagacaacgctcgaggtcttgtgcttccgggttacaaataccttggacccggcaacggactcgacaagggggagccggtcaacgcagcagacgcggcggccctcgagcacgacaaggcctacgaccagcagctcaaggccggagacaacccgtacctcaagtacaaccacgccgacgccgagttccaggagcggctcaaagaagatacgtcttttgggggcaacctcgggcgagcagtcttccaggccaaaaagaggcttcttgaacctcttggtctggttgaggaagcggctaagacggctcctggaaagaagaggcctgtagagcagtctcctcaggaaccggactcctccgcgggtattggcaaatcgggtgcacagcccgctaaaaagagactcaatttcggtcagactggcgacacagagtcagtcccagaccctcaaccaatcggagaacctcccgcagccccctcaggtgtgggatctcttacaatggcttcaggtggtggcgcaccagtggcagacaataacgaaggtgccgatggagtgggtagttcctcgggaaattggcattgcgattcccaatggctgggggacagagtcatcaccaccagcacccgaacctgggccctgcccacctacaacaatcacctctacaagcaaatctccaacagcacatctggaggatcttcaaatgacaacgcctacttcggctacagcaccccctgggggtattttgacttcaacagattccactgccacttctcaccacgtgactggcagcgactcatcaacaacaactggggattccggcctaagcgactcaacttcaagctcttcaacattcaggtcaaagaggttacggacaacaatggagtcaagaccatcgccaataaccttaccagcacggtccaggtcttcacggactcagactatcagctcccgtacgtgctcgggtcggctcacgagggctgcctcccgccgttcccagcggacgttttcatgattcctcagtacgggtatctgacgcttaatgatggaagccaggccgtgggtcgttcgtccttttactgcctggaatatttcccgtcgcaaatgctaagaacgggtaacaacttccagttcagctacgagtttgaggatgtacctttccatagcagctacgctcacagccaaagcctggaccgactaatgaatccactcatcgaccaatacttgtactatctctcaaagactattaacggttctggacagaatcaacaaacgctaaaattcagtgtcgccggacccagcaacatggctgtccagggaagaaactacatacctggacccagctaccgacaacaacgtgtctcaaccactgtgactcaaaacaacaacagcgaatttgcttggacgggagcttctaagtggcatctcaatggacgtaatagcttgatgaatcctggacctgctatggccagccacaaagaaggagaggaccgtttctttcctttgtctggatctttaatttttggcaaacaaggaactggaagagacaacgtggatgcggacaaagtcatgataaccaacgaagaagaaattaaaactactaacccggtagcaacggagtcctatggacaagtggccacaaaccaccagagtgcccaagcacaggcgcagaccggctgggttcaaaaccaaggaatacttccgggtatggtttggcaggacagagatgtgtacctgcaaggacccatttgggccaaaattcctcacacggacggcaactttcacccttctccgctgatgggagggtttggaatgaagcacccgcctcctcagatcctcatcaaaaacacacctgtacctgcggatcctccaacggccttcaacaaggacaagctgaactctttcatcacccagtattctactggccaagtcagcgtggagatcgagtgggagctgcagaaggaaaacagcaagcgctggaacccggagatccagtacacttccaactattacaagtctaataatgttgaatttgctgttaatactgaaggtgtatatagtgaaccccgccccattggcaccagatacctgactcgtaatctg

SEQ ID NO: 300 - protein, 736 aa, synthetic construct
  REGION 1..736: note = Adeno Associated Virus Capsid Protein Variant
MAADGYLPDWLEDNLSEGIREWWALKPGAPQPKANQQHQDNARGLVLPGYKYLGPGNGLDKGEPVNAADAAALEHDKAYDQQLKAGDNPYLKYNHADAEFQERLKEDTSFGGNLGRAVFQAKKRLLEPLGLVEEAAKTAPGKKRPVEQSPQEPDSSAGIGKSGAQPAKKRLNFGQTGDTESVPDPQPIGEPPAAPSGVGSLTMASGGGAPVADNNEGADGVGSSSGNWHCDSQWLGDRVITTSTRTWALPTYNNHLYKQISNSTSGGSSNDNAYFGYSTPWGYFDFNRFHCHFSPRDWQRLINNNWGFRPKRLNFKLFNIQVKEVTDNNGVKTIANNLTSTVQVFTDSDYQLPYVLGSAHEGCLPPFPADVFMIPQYGYLTLNDGSQAVGRSSFYCLEYFPSQMLRTGNNFQFSYEFEDVPFHSSYAHSQSLDRLMNPLIDQYLYYLSKTINGSGQNQQTLKFSVAGPSNMAVQGRNYIPGPSYRQQRVSTTVTQNNNSEFAWTGASKWHLNGRNSLMNPGPAMASHKEGEDRFFPLSGSLIFGKQGTGRDNVDADKVMITNEEEIKTTNPVATESYGQVATNHQSAQAQAQTGWVQNQGILPGMVWQDRDVYLQGPIWAKIPHTDGNFHPSPLMGGFGMKHPPPQILIKNTPVPADPPTAFNKDKLNSFITQYSTGQVSVEIEWELQKENSKRWNPEIQYTSNYYKSNNVEFAVNTEGVYSEPRPIGTRYLTRNL

SEQ ID NO: 301 - DNA, 2208 bp, synthetic construct
  misc_feature 1..2208: note = Adeno Associated Virus Capsid Protein Variant
  source 1..2208: mol_type = other DNA
atggctgccgatggttatcttccagattggctcgaggacaaccttagtgaaggaattcgcgagtggtgggctttgaaacctggagcccctcaacccaaggcaaatcaacaacatcaagacaacgctcgaggtcttgtgcttccgggttacaaataccttggacccggcaacggactcgacaagggggagccggtcaacgcagcagacgcggcggccctcgagcacgacaaggcctacgaccagcagctcaaggccggagacaacccgtacctcaagtacaaccacgccgacgccgagttccaggagcggctcaaagaagatacgtcttttgggggcaacctcgggcgagcagtcttccaggccaaaaagaggcttcttgaacctcttggtctggttgaggaagcggctaagacggctcctggaaagaagaggcctgtagagcagtctcctcaggaaccggactcctccgcgggtattggcaaatcgggtgcacagcccgctaaaaagagactcaatttcggtcagactggcgacacagagtcagtcccagaccctcaaccaatcggagaacctcccgcagccccctcaggtgtgggatctcttacaatggcttcaggtggtggcgcaccagtggcagacaataacgaaggtgccgatggagtgggtagttcctcgggaaattggcattgcgattcccaatggctgggggacagagtcatcaccaccagcacccgaacctgggccctgcccacctacaacaatcacctctacaagcaaatctccaacagcacatctggaggatcttcaaatgacaacgcctacttcggctacagcaccccctgggggtattttgacttcaacagattccactgccacttctcaccacgtgactggcagcgactcatcaacaacaactggggattccggcctaagcgactcaacttcaagctcttcaacattcaggtcaaagaggttacggacaacaatggagtcaagaccatcgccaataaccttaccagcacggtccaggtcttcacggactcagactatcagctcccgtacgtgctcgggtcggctcacgagggctgcctcccgccgttcccagcggacgttttcatgattcctcagtacgggtatctgacgcttaatgatggaagccaggccgtgggtcgttcgtccttttactgcctggaatatttcccgtcgcaaatgctaagaacgggtaacaacttccagttcagctacgagtttgagaacgtacctttccatagcagctacgctcacagccaaagcctggaccgactaatgaatccactcatcgaccaatacttgtactatctctcaaagactattaacggttctggacagaatcaacaaacgctaaaattcagtgtggccggacccagcaacatggctgtccagggaagaaactacatacctggacccagctaccgacaacaacgtgtctcaaccactgtgactcaaaacaacaacagcgaatttgcttggcctggagcttcttcttgggctctcaatggacgtaatagcttgatgaatcctggacctgctatggccagccacaaagaaggagaggaccgtttctttcctttgtctggatctttaatttttggcaaacaaggaactggaagagacaacgtggatgcggacaaagtcatgataaccaacgaagaagaaattaaaactactaacccggtagcaacggagtcctatggacaagtggccacaaaccaccagagtgcccaagcacaggcgcagaccggctgggttcaaaaccaaggaatacttccgggtatggtttggcaggacagagatgtgtacctgcaaggacccatttgggccaaaattcctcacacggacggcaactttcacccttctccgctgatgggagggtttggaatgaagcacccgcctcctcagatcctcatcaaaaacacacctgtacctgcggatcctccaacggccttcaacaaggacaagacgaactctttcatcacccagtattctactggccaagtcagcgtggagatcgagtgggagctgcagaaggaaaacagcaagcgctggaacccggagatccagtacacttccaactattacaagtctaataatgttgaatttgctgttaatactgaaggtgtatatagtgaaccccgccccattggcaccagatacctgactcgtaatctg

SEQ ID NO: 302 - protein, 736 aa, synthetic construct
  REGION 1..736: note = Adeno Associated Virus Capsid Protein Variant
MAADGYLPDWLEDNLSEGIREWWALKPGAPQPKANQQHQDNARGLVLPGYKYLGPGNGLDKGEPVNAADAAALEHDKAYDQQLKAGDNPYLKYNHADAEFQERLKEDTSFGGNLGRAVFQAKKRLLEPLGLVEEAAKTAPGKKRPVEQSPQEPDSSAGIGKSGAQPAKKRLNFGQTGDTESVPDPQPIGEPPAAPSGVGSLTMASGGGAPVADNNEGADGVGSSSGNWHCDSQWLGDRVITTSTRTWALPTYNNHLYKQISNSTSGGSSNDNAYFGYSTPWGYFDFNRFHCHFSPRDWQRLINNNWGFRPKRLNFKLFNIQVKEVTDNNGVKTIANNLTSTVQVFTDSDYQLPYVLGSAHEGCLPPFPADVFMIPQYGYLTLNDGSQAVGRSSFYCLEYFPSQMLRTGNNFQFSYEFENVPFHSSYAHSQSLDRLMNPLIDQYLYYLSKTINGSGQNQQTLKFSVAGPSNMAVQGRNYIPGPSYRQQRVSTTVTQNNNSEFAWPGASSWALNGRNSLMNPGPAMASHKEGEDRFFPLSGSLIFGKQGTGRDNVDADKVMITNEEEIKTTNPVATESYGQVATNHQSAQAQAQTGWVQNQGILPGMVWQDRDVYLQGPIWAKIPHTDGNFHPSPLMGGFGMKHPPPQILIKNTPVPADPPTAFNKDKTNSFITQYSTGQVSVEIEWELQKENSKRWNPEIQYTSNYYKSNNVEFAVNTEGVYSEPRPIGTRYLTRNL

SEQ ID NO: 303 - DNA, 2208 bp, synthetic construct
  misc_feature 1..2208: note = Adeno Associated Virus Capsid Protein Variant
  source 1..2208: mol_type = other DNA
atggctgccgatggttatcttccagattggctcgaggacaaccttagtgaaggaattcgcgagtggtgggctttgaaacctggagcccctcaacccaaggcaaatcaacaacatcaagacaacgctcgaggtcttgtgcttccgggttacaaataccttggacccggcaacggactcgacaagggggagccggtcaacgcagcagacgcggcggccctcgagcacgacaaggcctacgaccagcagctcaaggccggagacaacccgtacctcaagtacaaccacgccgacgccgagttccaggagcggctcaaagaagatacgtcttttgggggcaacctcgggcgagcagtcttccaggccaaaaagaggcttcttgaacctcttggtctggttgaggaagcggctaagacggctcctggaaagaagaggcctgtagagcagtctcctcaggaaccggactcctccgcgggtattggcaaatcgggtgcacagcccgctaaaaagagactcaatttcggtcagactggcgacacagagtcagtcccagaccctcaaccaatcggagaacctcccgcagccccctcaggtgtgggatctcttacaatggcttcaggtggtggcgcaccagtggcagacaataacgaaggtgccgatggagtgggtagttcctcgggaaattggcattgcgattcccaatggctgggggacagagtcatcaccaccagcacccgaacctgggccctgcccacctacaacaatcacctctacaagcaaatctccaacagcacatctggaggatcttcaaatgacaacgcctacttcggctacagcaccccctgggggtattttgacttcaacagattccactgccacttctcaccacgtgactggcagcgactcatcaacaacaactggggattccggcctaagcgactcaacttcaagctcttcaacattcaggtcaaagaggttacggacaacaatggagtcaagaccatcgccaataaccttaccagcacggtccaggtcttcacggactcagactatcagctcccgtacgtgctcgggtcggctcacgagggctgcctcccgccgttcccagcggacgttttcatgattcctcagtacgggtatctgacgcttaatgatggaagccaggccgtgggtcgttcgtccttttactgcctggaatatttcccgtcgcaaatgctaagaacgggtaacaacttccagttcagctacgagtttgagaacgtacctttccatagcagctacgctcacagccaaagcctggaccgactaatgaatccactcatcgaccaatacttgtactatctctcaaagactattaacggttctggacagaatcaacaaacgctaaaattcagtgtggccggacccagcaacatggctgtccagggaagaaactacatacctggacccagctaccgacaacaacgtgtctcaaccactgtgactcaaaacaacaacagcgaatttgcttggcctggagcttcttcttgggctctcaatggacgtaatagcttgatgaatcctggacctgctatggccagccacaaagaaggagaggaccgtttctttcctttgtctggatctttaatttttggcaaacaaggaacttggagagacaacgtggatgcggacaaagtcatgataaccaacgaagaagaaattaaaactactaacccggtagcaacggagtcctatggacaagtggccacaaaccaccagagtgcccaagcacaggcgcagaccggctgggttcaaaaccaaggaatacttccgggtatggtttggcaggacagagatgtgtacctgcaaggacccatttgggccaaaattcctcacacggacggcaactttcacccttctccgctgatgggagggtttggaatgaagcacccgcctcctcagatcctcatcaaaaacacacctgtacctgcggatcctccaacggccttcaacaaggacaagctgaactctttcatcacccagtattctactggccaagtcagcgtggagatcgagtgggagctgcagaaggaaaacagcaagcgctggaacccggagatccagtacacttccaactattacaagtctaataatgttgaatttgctgttaatactgaaggtgtatatagtgaaccccgccccattggcaccagatacctgactcgtaatctg

SEQ ID NO: 304 - protein, 736 aa, synthetic construct
  REGION 1..736: note = Adeno Associated Virus Capsid Protein Variant
MAADGYLPDWLEDNLSEGIREWWALKPGAPQPKANQQHQDNARGLVLPGYKYLGPGNGLDKGEPVNAADAAALEHDKAYDQQLKAGDNPYLKYNHADAEFQERLKEDTSFGGNLGRAVFQAKKRLLEPLGLVEEAAKTAPGKKRPVEQSPQEPDSSAGIGKSGAQPAKKRLNFGQTGDTESVPDPQPIGEPPAAPSGVGSLTMASGGGAPVADNNEGADGVGSSSGNWHCDSQWLGDRVITTSTRTWALPTYNNHLYKQISNSTSGGSSNDNAYFGYSTPWGYFDFNRFHCHFSPRDWQRLINNNWGFRPKRLNFKLFNIQVKEVTDNNGVKTIANNLTSTVQVFTDSDYQLPYVLGSAHEGCLPPFPADVFMIPQYGYLTLNDGSQAVGRSSFYCLEYFPSQMLRTGNNFQFSYEFENVPFHSSYAHSQSLDRLMNPLIDQYLYYLSKTINGSGQNQQTLKFSVAGPSNMAVQGRNYIPGPSYRQQRVSTTVTQNNNSEFAWPGASSWALNGRNSLMNPGPAMASHKEGEDRFFPLSGSLIFGKQGTWRDNVDADKVMITNEEEIKTTNPVATESYGQVATNHQSAQAQAQTGWVQNQGILPGMVWQDRDVYLQGPIWAKIPHTDGNFHPSPLMGGFGMKHPPPQILIKNTPVPADPPTAFNKDKLNSFITQYSTGQVSVEIEWELQKENSKRWNPEIQYTSNYYKSNNVEFAVNTEGVYSEPRPIGTRYLTRNL

SEQ ID NO: 305 - DNA, 2208 bp, synthetic construct
  misc_feature 1..2208: note = Adeno Associated Virus Capsid Protein Variant
  source 1..2208: mol_type = other DNA
atggctgccgatggttatcttccagattggctcgaggacaaccttagtgaaggaattcgcgagtggtgggctttgaaacctggagcccctcaacccaaggcaaatcaacaacatcaagacaacgctcgaggtcttgtgcttccgggttacaaataccttggacccggcaacggactcgacaagggggagccggtcaacgcagcagacgcggcggccctcgagcacgacaaggcctacgaccagcagctcaaggccggagacaacccgtacctcaagtacaaccacgccgacgccgagttccaggagcggctcaaagaagatacgtcttttgggggcaacctcgggcgagcagtcttccaggccaaaaagaggcttcttgaacctcttggtctggttgaggaagcggctaagacggctcctggaaagaagaggcctgtagagcagtctcctcaggaaccggactcctccgcgggtattggcaaatcgggtgcacagcccgctaaaaagagactcaatttcggtcagactggcgacacagagtcagtcccagaccctcaaccaatcggagaacctcccgcagccccctcaggtgtgggatctcttacaatggcttcaggtggtggcgcaccagtggcagacaataacgaaggtgccgatggagtgggtagttcctcgggaaattggcattgcgattcccaatggctgggggacagagtcatcaccaccagcacccgaacctgggccctgcccacctacaacaatcacctctacaagcaaatctccaacagcacatctggaggatcttcaaatgacaacgcctacttcggctacagcaccccctgggggtattttgacttcaacagattccactgccacttctcaccacgtgactggcagcgactcatcaacaacaactggggattccggcctaagcgactcaacttcaagctcttcaacattcaggtcaaagaggttacggacaacaatggagtcaagaccatcgccaataaccttaccagcacggtccaggtcttcacggactcagactatcagctcccgtacgtgctcgggtcggctcacgagggctgcctcccgccgttcccagcggacgttttcatgattcctcagtacgggtatctgacgcttaatgatggaagccaggccgtgggtcgttcgtccttttactgcctggaatatttcccgtcgcaaatgctaagaacgggtaacaacttccagttcagctacgagtttgagaacgtacctttccatagcagctacgctcacagccaaagcctggaccgactaatgaatccactcatcgaccaatacttgtactatctctcaaagactattaacggttctggacagaatcaacaaacgctaaaattcagtgtggccggacccagcaacatggctgtccagggaagaaactacatacctggacccagctaccgacaacaacgtgtctcaaccactgtgactcaaaacaacaacagcgaatttgcttggcctggagcttcttcttgggctctcaatggacgtaatagcttgatgaatcctggacctgctatggccagccacattgaaggagaggaccgtttctttcctttgtctggatctttaatttttggcaaacaaggaactggaagagacaacgtggatgcggacaaagtcatgataaccaacgaagaagaaattaaaactactaacccggtagcaacggagtcctatggacaagtggccacaaaccaccagagtgcccaagcacaggcgcagaccggctgggttcaaaaccaaggaatacttccgggtatggtttggcaggacagagatgtgtacctgcaaggacccatttgggccaaaattcctcacacggacggcaactttcacccttctccgctgatgggagggtttggaatgaagcacccgcctcctcagatcctcatcaaaaacacacctgtacctgcggatcctccaacggccttcaacaaggacaagctgaactctttcatcacccagtattctactggccaagtcagcgtggagatcgagtgggagctgcagaaggaaaacagcaagcgctggaacccggagatccagtacacttccaactattacaagtctaataatgttgaatttgctgttaatactgaaggtgtatatagtgaaccccgccccattggcaccagatacctgactcgtaatctg

SEQ ID NO: 306 - protein, 736 aa, synthetic construct
  REGION 1..736: note = Adeno Associated Virus Capsid Protein Variant
MAADGYLPDWLEDNLSEGIREWWALKPGAPQPKANQQHQDNARGLVLPGYKYLGPGNGLDKGEPVNAADAAALEHDKAYDQQLKAGDNPYLKYNHADAEFQERLKEDTSFGGNLGRAVFQAKKRLLEPLGLVEEAAKTAPGKKRPVEQSPQEPDSSAGIGKSGAQPAKKRLNFGQTGDTESVPDPQPIGEPPAAPSGVGSLTMASGGGAPVADNNEGADGVGSSSGNWHCDSQWLGDRVITTSTRTWALPTYNNHLYKQISNSTSGGSSNDNAYFGYSTPWGYFDFNRFHCHFSPRDWQRLINNNWGFRPKRLNFKLFNIQVKEVTDNNGVKTIANNLTSTVQVFTDSDYQLPYVLGSAHEGCLPPFPADVFMIPQYGYLTLNDGSQAVGRSSFYCLEYFPSQMLRTGNNFQFSYEFENVPFHSSYAHSQSLDRLMNPLIDQYLYYLSKTINGSGQNQQTLKFSVAGPSNMAVQGRNYIPGPSYRQQRVSTTVTQNNNSEFAWPGASSWALNGRNSLMNPGPAMASHIEGEDRFFPLSGSLIFGKQGTGRDNVDADKVMITNEEEIKTTNPVATESYGQVATNHQSAQAQAQTGWVQNQGILPGMVWQDRDVYLQGPIWAKIPHTDGNFHPSPLMGGFGMKHPPPQILIKNTPVPADPPTAFNKDKLNSFITQYSTGQVSVEIEWELQKENSKRWNPEIQYTSNYYKSNNVEFAVNTEGVYSEPRPIGTRYLTRNL

SEQ ID NO: 307 - DNA, 2208 bp, synthetic construct
  misc_feature 1..2208: note = Adeno Associated Virus Capsid Protein Variant
  source 1..2208: mol_type = other DNA
atggctgccgatggttatcttccagattggctcgaggacaaccttagtgaaggaattcgcgagtggtgggctttgaaacctggagcccctcaacccaaggcaaatcaacaacatcaagacaacgctcgaggtcttgtgcttccgggttacaaataccttggacccggcaacggactcgacaagggggagccggtcaacgcagcagacgcggcggccctcgagcacgacaaggcctacgaccagcagctcaaggccggagacaacccgtacctcaagtacaaccacgccgacgccgagttccaggagcggctcaaagaagatacgtcttttgggggcaacctcgggcgagcagtcttccaggccaaaaagaggcttcttgaacctcttggtctggttgaggaagcggctaagacggctcctggaaagaagaggcctgtagagcagtctcctcaggaaccggactcctccgcgggtattggcaaatcgggtgcacagcccgctaaaaagagactcaatttcggtcagactggcgacacagagtcagtcccagaccctcaaccaatcggagaacctcccgcagccccctcaggtgtgggatctcttacaatggcttcaggtggtggcgcaccagtggcagacaataacgaaggtgccgatggagtgggtagttcctcgggaaattggcattgcgattcccaatggctgggggacagagtcatcaccaccagcacccgaacctgggccctgcccacctacaacaatcacctctacaagcaaatctccaacagcacatctggaggatcttcaaatgacaacgcctacttcggctacagcaccccctgggggtattttgacttcaacagattccactgccacttctcaccacgtgactggcagcgactcatcaacaacaactggggattccggcctaagcgactcaacttcaagctcttcaacattcaggtcaaagaggttacggacaacaatggagtcaagaccatcgccaataaccttaccagcacggtccaggtcttcacggactcagactatcagctcccgtacgtgctcgggtcggctcacgagggctgcctcccgccgttcccagcggacgttttcatgattcctcagtacgggtatctgacgcttaatgatggaagccaggccgtgggtcgttcgtccttttactgcctggaatatttcccgtcgcaaatgctaagaacgggtaacaacttccagttcagctacgagtttgagaacgtacctttccatagcagctacgctcacagccaaagcctggaccgactaatgaatccactcatcgaccaatacttgtactatctctcaaagactattaacggttctggacagaatcaacaaacgctaaaattcagtgtggccggacccagcaacatggctgtccagggaagaaactacatacctggacccagctaccgacaacaacgtgtctcaaccactgtgactcaaaactgtaacagcgaatttgcttggcctggagcttcttcttgggctctcaatggacgtaatagcttgatgaatcctggacctgctatggccagccacaaagaaggagaggaccgtttctttcctttgtctggatctttaatttttggcaaacaaggaactggaagagacaacgtggatgcggacaaagtcatgataaccaacgaagaagaaattaaaactactaacccggtagcaacggagtcctatggacaagtggccacaaaccaccagagtgcccaagcacaggcgcagaccggctgggttcaaaaccaaggaatacttccgggtatggtttggcaggacagagatgtgtacctgcaaggacccatttgggccaaaattcctcacacggacggcaactttcacccttctccgctgatgggagggtttggaatgaagcacccgcctcctcagatcctcatcaaaaacacacctgtacctgcggatcctccaacggccttcaacaaggacaagctgaactctttcatcacccagtattctactggccaagtcagcgtggagatcgagtgggagctgcagaaggaaaacagcaagcgctggaacccggagatccagtacacttccaactattacaagtctaataatgttgaatttgctgttaatactgaaggtgtatatagtgaaccccgccccattggcaccagatacctgactcgtaatctg

SEQ ID NO: 308 - protein, 736 aa, synthetic construct
  REGION 1..736: note = Adeno Associated Virus Capsid Protein Variant
MAADGYLPDWLEDNLSEGIREWWALKPGAPQPKANQQHQDNARGLVLPGYKYLGPGNGLDKGEPVNAADAAALEHDKAYDQQLKAGDNPYLKYNHADAEFQERLKEDTSFGGNLGRAVFQAKKRLLEPLGLVEEAAKTAPGKKRPVEQSPQEPDSSAGIGKSGAQPAKKRLNFGQTGDTESVPDPQPIGEPPAAPSGVGSLTMASGGGAPVADNNEGADGVGSSSGNWHCDSQWLGDRVITTSTRTWALPTYNNHLYKQISNSTSGGSSNDNAYFGYSTPWGYFDFNRFHCHFSPRDWQRLINNNWGFRPKRLNFKLFNIQVKEVTDNNGVKTIANNLTSTVQVFTDSDYQLPYVLGSAHEGCLPPFPADVFMIPQYGYLTLNDGSQAVGRSSFYCLEYFPSQMLRTGNNFQFSYEFENVPFHSSYAHSQSLDRLMNPLIDQYLYYLSKTINGSGQNQQTLKFSVAGPSNMAVQGRNYIPGPSYRQQRVSTTVTQNCNSEFAWPGASSWALNGRNSLMNPGPAMASHKEGEDRFFPLSGSLIFGKQGTGRDNVDADKVMITNEEEIKTTNPVATESYGQVATNHQSAQAQAQTGWVQNQGILPGMVWQDRDVYLQGPIWAKIPHTDGNFHPSPLMGGFGMKHPPPQILIKNTPVPADPPTAFNKDKLNSFITQYSTGQVSVEIEWELQKENSKRWNPEIQYTSNYYKSNNVEFAVNTEGVYSEPRPIGTRYLTRNL

SEQ ID NO: 309 - DNA, 2208 bp, synthetic construct
  misc_feature 1..2208: note = Adeno Associated Virus Capsid Protein Variant
  source 1..2208: mol_type = other DNA
atggctgccgatggttatcttccagattggctcgaggacaaccttagtgaaggaattcgcgagtggtgggctttgaaacctggagcccctcaacccaaggcaaatcaacaacatcaagacaacgctcgaggtcttgtgcttccgggttacaaataccttggacccggcaacggactcgacaagggggagccggtcaacgcagcagacgcggcggccctcgagcacgacaaggcctacgaccagcagctcaaggccggagacaacccgtacctcaagtacaaccacgccgacgccgagttccaggagcggctcaaagaagatacgtcttttgggggcaacctcgggcgagcagtcttccaggccaaaaagaggcttcttgaacctcttggtctggttgaggaagcggctaagacggctcctggaaagaagaggcctgtagagcagtctcctcaggaaccggactcctccgcgggtattggcaaatcgggtgcacagcccgctaaaaagagactcaatttcggtcagactggcgacacagagtcagtcccagaccctcaaccaatcggagaacctcccgcagccccctcaggtgtgggatctcttacaatggcttcaggtggtggcgcaccagtggcagacaataacgaaggtgccgatggagtgggtagttcctcgggaaattggcattgcgattcccaatggctgggggacagagtcatcaccaccagcacccgaacctgggccctgcccacctacaacaatcacctctacaagcaaatctccaacagcacatctggaggatcttcaaatgacaacgcctacttcggctacagcaccccctgggggtattttgacttcaacagattccactgccacttctcaccacgtgactggcagcgactcatcaacaacaactggggattccggcctaagcgactcaacttcaagctcttcaacattcaggtcaaagaggttacggacaacaatggagtcaagaccatcgccaataaccttaccagcacggtccaggtcttcacggactcagactatcagctcccgtacgtgctcgggtcggctcacgagggctgcctcccgccgttcccagcggacgttttcatgattcctcagtacgggtatctgacgcttaatgatggaagccaggccgtgggtcgttcgtccttttactgcctggaatatttcccgtcgcaaatgctaagaacgggtaacaacttccagttcagctacgagtttgagaacgtacctttccatagcagctacgctcacagccaaagcctggaccgactaatgaatccactcatcgaccaatacttgtactatctctcaaagactattaacggttctggacagaatcaacaaacgctaaaattcagtgtggccggacccagcaacatggctgtccagggaagaaactacatacctggacccagctaccgacaacaacgtgtctcaaccactgtgactcaaaacaacaacagcgaatttgcttggcctggagcttcttcttgggctctcaatggacgtaatagcttgatgaatcctggacctgctatggccagccacaaagaaggagagaggcgtttctttcctttgtctggatctttaatttttggcaaacaaggaactggaagagacaacgtggatgcggacaaagtcatgataaccaacgaagaagaaattaaaactactaacccggtagcaacggagtcctatggacaagtggccacaaaccaccagagtgcccaagcacaggcgcagaccggctgggttcaaaaccaaggaatacttccgggtatggtttggcaggacagagatgtgtacctgcaaggacccatttgggccaaaattcctcacacggacggcaactttcacccttctccgctgatgggagggtttggaatgaagcacccgcctcctcagatcctcatcaaaaacacacctgtacctgcggatcctccaacggccttcaacaaggacaagctgaactctttcatcacccagtattctactggccaagtcagcgtggagatcgagtgggagctgcagaaggaaaacagcaagcgctggaacccggagatccagtacacttccaactattacaagtctaataatgttgaatttgctgttaatactgaaggtgtatatagtgaaccccgccccattggcaccagatacctgactcgtaatctg

SEQ ID NO: 310 - protein, 736 aa, synthetic construct
  REGION 1..736: note = Adeno Associated Virus Capsid Protein Variant
MAADGYLPDWLEDNLSEGIREWWALKPGAPQPKANQQHQDNARGLVLPGYKYLGPGNGLDKGEPVNAADAAALEHDKAYDQQLKAGDNPYLKYNHADAEFQERLKEDTSFGGNLGRAVFQAKKRLLEPLGLVEEAAKTAPGKKRPVEQSPQEPDSSAGIGKSGAQPAKKRLNFGQTGDTESVPDPQPIGEPPAAPSGVGSLTMASGGGAPVADNNEGADGVGSSSGNWHCDSQWLGDRVITTSTRTWALPTYNNHLYKQISNSTSGGSSNDNAYFGYSTPWGYFDFNRFHCHFSPRDWQRLINNNWGFRPKRLNFKLFNIQVKEVTDNNGVKTIANNLTSTVQVFTDSDYQLPYVLGSAHEGCLPPFPADVFMIPQYGYLTLNDGSQAVGRSSFYCLEYFPSQMLRTGNNFQFSYEFENVPFHSSYAHSQSLDRLMNPLIDQYLYYLSKTINGSGQNQQTLKFSVAGPSNMAVQGRNYIPGPSYRQQRVSTTVTQNNNSEFAWPGASSWALNGRNSLMNPGPAMASHKEGERRFFPLSGSLIFGKQGTGRDNVDADKVMITNEEEIKTTNPVATESYGQVATNHQSAQAQAQTGWVQNQGILPGMVWQDRDVYLQGPIWAKIPHTDGNFHPSPLMGGFGMKHPPPQILIKNTPVPADPPTAFNKDKLNSFITQYSTGQVSVEIEWELQKENSKRWNPEIQYTSNYYKSNNVEFAVNTEGVYSEPRPIGTRYLTRNL

SEQ ID NO: 311 - DNA, 2208 bp, synthetic construct
  misc_feature 1..2208: note = Adeno Associated Virus Capsid Protein Variant
  source 1..2208: mol_type = other DNA
atggctgccgatggttatcttccagattggctcgaggacaaccttagtgaaggaattcgcgagtggtgggctttgaaacctggagcccctcaacccaaggcaaatcaacaacatcaagacaacgctcgaggtcttgtgcttccgggttacaaataccttggacccggcaacggactcgacaagggggagccggtcaacgcagcagacgcggcggccctcgagcacgacaaggcctacgaccagcagctcaaggccggagacaacccgtacctcaagtacaaccacgccgacgccgagttccaggagcggctcaaagaagatacgtcttttgggggcaacctcgggcgagcagtcttccaggccaaaaagaggcttcttgaacctcttggtctggttgaggaagcggctaagacggctcctggaaagaagaggcctgtagagcagtctcctcaggaaccggactcctccgcgggtattggcaaatcgggtgcacagcccgctaaaaagagactcaatttcggtcagactggcgacacagagtcagtcccagaccctcaaccaatcggagaacctcccgcagccccctcaggtgtgggatctcttacaatggcttcaggtggtggcgcaccagtggcagacaataacgaaggtgccgatggagtgggtagttcctcgggaaattggcattgcgattcccaatggctgggggacagagtcatcaccaccagcacccgaacctgggccctgcccacctacaacaatcacctctacaagcaaatctccaacagcacatctggaggatcttcaaatgacaacgcctacttcggctacagcaccccctgggggtattttgacttcaacagattccactgccacttctcaccacgtgactggcagcgactcatcaacaacaactggggattccggcctaagcgactcaacttcaagctcttcaacattcaggtcaaagaggttacggacaacaatggagtcaagaccatcgccaataaccttaccagcacggtccaggtcttcacggactcagactatcagctcccgtacgtgctcgggtcggctcacgagggctgcctcccgccgttcccagcggacgttttcatgattcctcagtacgggtatctgacgcttaatgatggaagccaggccgtgggtcgttcgtccttttactgcctggaatatttcccgtcgcaaatgctaagaacgggtaacaacttccagttcagctacgagtttgagaacgtacctttccatagcagctacgctcacagccaaagcctggaccgactaatgaatccactcatcgaccaatacttgtactatctctcaaagactattaacggttctggacagaatcaacaaacgctaaaattcagtgtggccggacccagcaacatggctgtccagggaagaaactacatacctggacccagctaccgacaacaacgtgtctcaaccactgtgactcaaaacaacaacagcgaatttgcttggcctggagcttcttcttgggctctcaatggacgtaatagcttgatgaatcctggacctgctatggccagccacaaagaaggagaggaccgtttctttcctttgtctggatctttaatttttggcaaacaaggaactggaagagacaacgtggatgcggacaaagtcatgataaccaacgaagaagaaattaaaactactaacccggtagcaacggagtcctatggacaagtggccacaaaccaccagagtgcccaagcacaggcgcagaccggctgggttcaaaaccaaggaatacttccgggtatggtttggcaggacagagatgtgtacctgcaaggacccatttgggccaaaattcctcacacggacggcaactttcacccttctccgctgatgggagggtttggaatgaagcacccgcctcctcagatcctcatcaaaaacacacctgtacctgcggatcctccaacgtctttcaacaaggacaagctgaactctttcatcacccagtattctactggccaagtcagcgtggagatcgagtgggagctgcagaaggaaaacagcaagcgctggaacccggagatccagtacacttccaactattacaagtctaataatgttgaatttgctgttaatactgaaggtgtatatagtgaaccccgccccattggcaccagatacctgactcgtaatctg

SEQ ID NO: 312 - protein, 736 aa, synthetic construct
  REGION 1..736: note = Adeno Associated Virus Capsid Protein Variant
MAADGYLPDWLEDNLSEGIREWWALKPGAPQPKANQQHQDNARGLVLPGYKYLGPGNGLDKGEPVNAADAAALEHDKAYDQQLKAGDNPYLKYNHADAEFQERLKEDTSFGGNLGRAVFQAKKRLLEPLGLVEEAAKTAPGKKRPVEQSPQEPDSSAGIGKSGAQPAKKRLNFGQTGDTESVPDPQPIGEPPAAPSGVGSLTMASGGGAPVADNNEGADGVGSSSGNWHCDSQWLGDRVITTSTRTWALPTYNNHLYKQISNSTSGGSSNDNAYFGYSTPWGYFDFNRFHCHFSPRDWQRLINNNWGFRPKRLNFKLFNIQVKEVTDNNGVKTIANNLTSTVQVFTDSDYQLPYVLGSAHEGCLPPFPADVFMIPQYGYLTLNDGSQAVGRSSFYCLEYFPSQMLRTGNNFQFSYEFENVPFHSSYAHSQSLDRLMNPLIDQYLYYLSKTINGSGQNQQTLKFSVAGPSNMAVQGRNYIPGPSYRQQRVSTTVTQNNNSEFAWPGASSWALNGRNSLMNPGPAMASHKEGEDRFFPLSGSLIFGKQGTGRDNVDADKVMITNEEEIKTTNPVATESYGQVATNHQSAQAQAQTGWVQNQGILPGMVWQDRDVYLQGPIWAKIPHTDGNFHPSPLMGGFGMKHPPPQILIKNTPVPADPPTSFNKDKLNSFITQYSTGQVSVEIEWELQKENSKRWNPEIQYTSNYYKSNNVEFAVNTEGVYSEPRPIGTRYLTRNL

SEQ ID NO: 313 - DNA, 2208 bp, synthetic construct
  misc_feature 1..2208: note = Adeno Associated Virus Capsid Protein Variant
  source 1..2208: mol_type = other DNA
atggctgccgatggttatcttccagattggctcgaggacaaccttagtgaaggaattcgcgagtggtgggctttgaaacctggagcccctcaacccaaggcaaatcaacaacatcaagacaacgctcgaggtcttgtgcttccgggttacaaataccttggacccggcaacggactcgacaagggggagccggtcaacgcagcagacgcggcggccctcgagcacgacaaggcctacgaccagcagctcaaggccggagacaacccgtacctcaagtacaaccacgccgacgccgagttccaggagcggctcaaagaagatacgtcttttgggggcaacctcgggcgagcagtcttccaggccaaaaagaggcttcttgaacctcttggtctggttgaggaagcggctaagacggctcctggaaagaagaggcctgtagagcagtctcctcaggaaccggactcctccgcgggtattggcaaatcgggtgcacagcccgctaaaaagagactcaatttcggtcagactggcgacacagagtcagtcccagaccctcaaccaatcggagaacctcccgcagccccctcaggtgtgggatctcttacaatggcttcaggtggtggcgcaccagtggcagacaataacgaaggtgccgatggagtgggtagttcctcgggaaattggcattgcgattcccaatggctgggggacagagtcatcaccaccagcacccgaacctgggccctgcccacctacaacaatcacctctacaagcaaatctccaacagcacatctggaggatcttcaaatgacaacgcctacttcggctacagcaccccctgggggtattttgacttcaacagattccactgccacttctcaccacgtgactggcagcgactcatcaacaacaactggggattccggcctaagcgactcaacttcaagctcttcaacattcaggtcaaagaggttacggacaacaatggagtcaagaccatcgccaataaccttaccagcacggtccaggtcttcacggactcagactatcagctcccgtacgtgctcgggtcggctcacgagggctgcctcccgccgttcccagcggacgttttcatgattcctcagtacgggtatctgacgcttaatgatggaagccaggccgtgggtcgttcgtccttttactgcctggaatatttcccgtcgcaaatgctaagaacgggtaacaacttccagttcagctacgagtttgagaacgtacctttccatagcagctacgctcacagccaaagcctggaccgactaatgaatccactcatcgaccaatacttgtactatctctcaaagactattaacggttctggacagaatcaacaaacgctaaaattcagtgtggccggacccagcaacatggctgtccagggaagaaactacatacctggacccagctaccgacaacaacgtgtccctaccactgtgactcaaaacaacaacagcgaatttgcttggcctggagcttcttcttgggctctcaatggacgtaatagcttgatgaatcctggacctgctatggccagccacaaagaaggagaggaccgtttctttcctttgtctggatctttaatttttggcaaacaaggaactggaagagacaacgtggatgcggacaaagtcatgataaccaacgaagaagaaattaaaactactaacccggtagcaacggagtcctatggacaagtggccacaaaccaccagagtgcccaagcacaggcgcagaccggctgggttcaaaaccaaggaatacttccgggtatggtttggcaggacagagatgtgtacctgcaaggacccatttgggccaaaattcctcacacggacggcaactttcacccttctccgctgatgggagggtttggaatgaagcacccgcctcctcagatcctcatcaaaaacacacctgtacctgcggatcctccaacggccttcaacaaggacaagctgaactctttcatcacccagtattctactggccaagtcagcgtggagatcgagtgggagctgcagaaggaaaacagcaagcgctggaacccggagatccagtacacttccaactattacaagtctaataatgttgaatttgctgttaatactgaaggtgtatatagtgaaccccgccccattggcaccagatacctgactcgtaatctg

SEQ ID NO: 314 - protein, 736 aa, synthetic construct
  REGION 1..736: note = Adeno Associated Virus Capsid Protein Variant
MAADGYLPDWLEDNLSEGIREWWALKPGAPQPKANQQHQDNARGLVLPGYKYLGPGNGLDKGEPVNAADAAALEHDKAYDQQLKAGDNPYLKYNHADAEFQERLKEDTSFGGNLGRAVFQAKKRLLEPLGLVEEAAKTAPGKKRPVEQSPQEPDSSAGIGKSGAQPAKKRLNFGQTGDTESVPDPQPIGEPPAAPSGVGSLTMASGGGAPVADNNEGADGVGSSSGNWHCDSQWLGDRVITTSTRTWALPTYNNHLYKQISNSTSGGSSNDNAYFGYSTPWGYFDFNRFHCHFSPRDWQRLINNNWGFRPKRLNFKLFNIQVKEVTDNNGVKTIANNLTSTVQVFTDSDYQLPYVLGSAHEGCLPPFPADVFMIPQYGYLTLNDGSQAVGRSSFYCLEYFPSQMLRTGNNFQFSYEFENVPFHSSYAHSQSLDRLMNPLIDQYLYYLSKTINGSGQNQQTLKFSVAGPSNMAVQGRNYIPGPSYRQQRVPTTVTQNNNSEFAWPGASSWALNGRNSLMNPGPAMASHKEGEDRFFPLSGSLIFGKQGTGRDNVDADKVMITNEEEIKTTNPVATESYGQVATNHQSAQAQAQTGWVQNQGILPGMVWQDRDVYLQGPIWAKIPHTDGNFHPSPLMGGFGMKHPPPQILIKNTPVPADPPTAFNKDKLNSFITQYSTGQVSVEIEWELQKENSKRWNPEIQYTSNYYKSNNVEFAVNTEGVYSEPRPIGTRYLTRNL

SEQ ID NO: 315 - DNA, 2208 bp, synthetic construct
  misc_feature 1..2208: note = Adeno Associated Virus Capsid Protein Variant
  source 1..2208: mol_type = other DNA
atggctgccgatggttatcttccagattggctcgaggacaaccttagtgaaggaattcgcgagtggtgggctttgaaacctggagcccctcaacccaaggcaaatcaacaacatcaagacaacgctcgaggtcttgtgcttccgggttacaaataccttggacccggcaacggactcgacaagggggagccggtcaacgcagcagacgcggcggccctcgagcacgacaaggcctacgaccagcagctcaaggccggagacaacccgtacctcaagtacaaccacgccgacgccgagttccaggagcggctcaaagaagatacgtcttttgggggcaacctcgggcgagcagtcttccaggccaaaaagaggcttcttgaacctcttggtctggttgaggaagcggctaagacggctcctggaaagaagaggcctgtagagcagtctcctcaggaaccggactcctccgcgggtattggcaaatcgggtgcacagcccgctaaaaagagactcaatttcggtcagactggcgacacagagtcagtcccagaccctcaaccaatcggagaacctcccgcagccccctcaggtgtgggatctcttacaatggcttcaggtggtggcgcaccagtggcagacaataacgaaggtgccgatggagtgggtagttcctcgggaaattggcattgcgattcccaatggctgggggacagagtcatcaccaccagcacccgaacctgggccctgcccacctacaacaatcacctctacaagcaaatctccaacagcacatctggaggatcttcaaatgacaacgcctacttcggctacagcaccccctgggggtattttgacttcaacagattccactgccacttctcaccacgtgactggcagcgactcatcaacaacaactggggattccggcctaagcgactcaacttcaagctcttcaacattcaggtcaaagaggttacggacaacaatggagtcaagaccatcgccaataaccttaccagcacggtccaggtcttcacggactcagactatcagctcccgtacgtgctcgggtcggctcacgagggctgcctcccgccgttcccagcggacgttttcatgattcctcagtacgggtatctgacgcttaatgatggaagccaggccgtgggtcgttcgtccttttactgcctggaatatttcccgtcgcaaatgctaagaacgggtaacaacttccagttcagctacgagtttgagaacgtacctttccatagcagctacgctcacagccaaagcctggaccgactaatgaatccactcatcgaccaatacttgtactatctctcaaagactattaacggttctggacagaatcaacaaacgctaaaattcagtgtggccggacccagcaacatggctgtccagggaagaaactacatacctggacccagctaccgacaacaacgtgtctcaaccactgtgactcaaaacaacaacagcgaatttgcttggcctggagcttcttcttgggctctcaatggacgtaatagcttgatgaatcctggacctgctatggccagccacaaagaaggagaggaccgtttctttcctttgtctggatctttaatttttggcaaacaaggaactggaagagacaacgtggatgcggacaaagtcatgataaccaacgaagaagaaattaaaactactaacccggtagcaacggagtcctatggacaagtggccacaaaccaccagagtgcccaagcacaggcgcagaccggctgggttcaaaaccaaggaatacttccgggtatggtttggcaggacagagatgtgtacctgcaaggacccatttgggccaaaattcctcacacggacggcaactttcacccttctccgctgatgggagggtttggaatgaagcacccgcctcctcagatcctcatcaaaaacacacctgtacctgcggatcctccaacggccttcaacggggacaagctgaactctttcatcacccagtattctactggccaagtcagcgtggagatcgagtgggagctgcagaaggaaaacagcaagcgctggaacccggagatccagtacacttccaactattacaagtctaataatgttgaatttgctgttaatactgaaggtgtatatagtgaaccccgccccattggcaccagatacctgactcgtaatctg

SEQ ID NO: 316 - protein, 736 aa, synthetic construct
  REGION 1..736: note = Adeno Associated Virus Capsid Protein Variant
MAADGYLPDWLEDNLSEGIREWWALKPGAPQPKANQQHQDNARGLVLPGYKYLGPGNGLDKGEPVNAADAAALEHDKAYDQQLKAGDNPYLKYNHADAEFQERLKEDTSFGGNLGRAVFQAKKRLLEPLGLVEEAAKTAPGKKRPVEQSPQEPDSSAGIGKSGAQPAKKRLNFGQTGDTESVPDPQPIGEPPAAPSGVGSLTMASGGGAPVADNNEGADGVGSSSGNWHCDSQWLGDRVITTSTRTWALPTYNNHLYKQISNSTSGGSSNDNAYFGYSTPWGYFDFNRFHCHFSPRDWQRLINNNWGFRPKRLNFKLFNIQVKEVTDNNGVKTIANNLTSTVQVFTDSDYQLPYVLGSAHEGCLPPFPADVFMIPQYGYLTLNDGSQAVGRSSFYCLEYFPSQMLRTGNNFQFSYEFENVPFHSSYAHSQSLDRLMNPLIDQYLYYLSKTINGSGQNQQTLKFSVAGPSNMAVQGRNYIPGPSYRQQRVSTTVTQNNNSEFAWPGASSWALNGRNSLMNPGPAMASHKEGEDRFFPLSGSLIFGKQGTGRDNVDADKVMITNEEEIKTTNPVATESYGQVATNHQSAQAQAQTGWVQNQGILPGMVWQDRDVYLQGPIWAKIPHTDGNFHPSPLMGGFGMKHPPPQILIKNTPVPADPPTAFNGDKLNSFITQYSTGQVSVEIEWELQKENSKRWNPEIQYTSNYYKSNNVEFAVNTEGVYSEPRPIGTRYLTRNL

SEQ ID NO: 317 - DNA, 2208 bp, synthetic construct
  misc_feature 1..2208: note = Adeno Associated Virus Capsid Protein Variant
  source 1..2208: mol_type = other DNA
atggctgccgatggttatcttccagattggctcgaggacaaccttagtgaaggaattcgcgagtggtgggctttgaaacctggagcccctcaacccaaggcaaatcaacaacatcaagacaacgctcgaggtcttgtgcttccgggttacaaataccttggacccggcaacggactcgacaagggggagccggtcaacgcagcagacgcggcggccctcgagcacgacaaggcctacgaccagcagctcaaggccggagacaacccgtacctcaagtacaaccacgccgacgccgagttccaggagcggctcaaagaagatacgtcttttgggggcaacctcgggcgagcagtcttccaggccaaaaagaggcttcttgaacctcttggtctggttgaggaagcggctaagacggctcctggaaagaagaggcctgtagagcagtctcctcaggaaccggactcctccgcgggtattggcaaatcgggtgcacagcccgctaaaaagagactcaatttcggtcagactggcgacacagagtcagtcccagaccctcaaccaatcggagaacctcccgcagccccctcaggtgtgggatctcttacaatggcttcaggtggtggcgcaccagtggcagacaataacgaaggtgccgatggagtgggtagttcctcgggaaattggcattgcgattcccaatggctgggggacagagtcatcaccaccagcacccgaacctgggccctgcccacctacaacaatcacctctacaagcaaatctccaacagcacatctggaggatcttcaaatgacaacgcctacttcggctacagcaccccctgggggtattttgacttcaacagattccactgccacttctcaccacgtgactggcagcgactcatcaacaacaactggggattccggcctaagcgactcaacttcaagctcttcaacattcaggtcaaagaggttacggacaacaatggagtcaagaccatcgccaataaccttaccagcacggtccaggtcttcacggactcagactatcagctcccgtacgtgctcgggtcggctcacgagggctgcctcccgccgttcccagcggacgttttcatgattcctcagtacgggtatctgacgcttaatgatggaagccaggccgtgggtcgttcgtccttttactgcctggaatatttcccgtcgcaaatgctaagaacgggtaacaacttccagttcagctacgagtttgagaacgtacctttccatagcagctacgctcacagccaaagcctggaccgactaatgaatccactcatcgaccaatacttgtactatctctcaaagactattaacggttctggacagaatcaacaaacgctaaaattcagtgtggccggacccagcaacatggctgtccagggaagaaactacatacctggacccagctaccgacaacaacgtgtctcaaccactgtgactcaaaacaacaacagcgaatttgcttggcctggagcttcttcttgggctctcaatggacgtaatagcttgatgaatcctggacctgctatggccagccacaaagaaggagaggaccgtttctttcctttgtctggatctttaatttttggcaaacaaggaactggaagagacaacaaggatgcggacaaagtcatgataaccaacgaagaagaaattaaaactactaacccggtagcaacggagtcctatggacaagtggccacaaaccaccagagtgcccaagcacaggcgcagaccggctgggttcaaaaccaaggaatacttccgggtatggtttggcaggacagagatgtgtacctgcaaggacccatttgggccaaaattcctcacacggacggcaactttcacccttctccgctgatgggagggtttggaatgaagcacccgcctcctcagatcctcatcaaaaacacacctgtacctgcggatcctccaacggccttcaacaaggacaagctgaactctttcatcacccagtattctactggccaagtcagcgtggagatcgagtgggagctgcagaaggaaaacagcaagcgctggaacccggagatccagtacacttccaactattacaagtctaataatgttgaatttgctgttaatactgaaggtgtatatagtgaaccccgccccattggcaccagatacctgactcgtaatctg

SEQ ID NO: 318 - protein, 736 aa, synthetic construct
  REGION 1..736: note = Adeno Associated Virus Capsid Protein Variant
MAADGYLPDWLEDNLSEGIREWWALKPGAPQPKANQQHQDNARGLVLPGYKYLGPGNGLDKGEPVNAADAAALEHDKAYDQQLKAGDNPYLKYNHADAEFQERLKEDTSFGGNLGRAVFQAKKRLLEPLGLVEEAAKTAPGKKRPVEQSPQEPDSSAGIGKSGAQPAKKRLNFGQTGDTESVPDPQPIGEPPAAPSGVGSLTMASGGGAPVADNNEGADGVGSSSGNWHCDSQWLGDRVITTSTRTWALPTYNNHLYKQISNSTSGGSSNDNAYFGYSTPWGYFDFNRFHCHFSPRDWQRLINNNWGFRPKRLNFKLFNIQVKEVTDNNGVKTIANNLTSTVQVFTDSDYQLPYVLGSAHEGCLPPFPADVFMIPQYGYLTLNDGSQAVGRSSFYCLEYFPSQMLRTGNNFQFSYEFENVPFHSSYAHSQSLDRLMNPLIDQYLYYLSKTINGSGQNQQTLKFSVAGPSNMAVQGRNYIPGPSYRQQRVSTTVTQNNNSEFAWPGASSWALNGRNSLMNPGPAMASHKEGEDRFFPLSGSLIFGKQGTGRDNKDADKVMITNEEEIKTTNPVATESYGQVATNHQSAQAQAQTGWVQNQGILPGMVWQDRDVYLQGPIWAKIPHTDGNFHPSPLMGGFGMKHPPPQILIKNTPVPADPPTAFNKDKLNSFITQYSTGQVSVEIEWELQKENSKRWNPEIQYTSNYYKSNNVEFAVNTEGVYSEPRPIGTRYLTRNL

SEQ ID NO: 319 - DNA, 2208 bp, synthetic construct
  misc_feature 1..2208: note = Adeno Associated Virus Capsid Protein Variant
  source 1..2208: mol_type = other DNA
atggctgccgatggttatcttccagattggctcgaggacaaccttagtgaaggaattcgcgagtggtgggctttgaaacctggagcccctcaacccaaggcaaatcaacaacatcaagacaacgctcgaggtcttgtgcttccgggttacaaataccttggacccggcaacggactcgacaagggggagccggtcaacgcagcagacgcggcggccctcgagcacgacaaggcctacgaccagcagctcaaggccggagacaacccgtacctcaagtacaaccacgccgacgccgagttccaggagcggctcaaagaagatacgtcttttgggggcaacctcgggcgagcagtcttccaggccaaaaagaggcttcttgaacctcttggtctggttgaggaagcggctaagacggctcctggaaagaagaggcctgtagagcagtctcctcaggaaccggactcctccgcgggtattggcaaatcgggtgcacagcccgctaaaaagagactcaatttcggtcagactggcgacacagagtcagtcccagaccctcaaccaatcggagaacctcccgcagccccctcaggtgtgggatctcttacaatggcttcaggtggtggcgcaccagtggcagacaataacgaaggtgccgatggagtgggtagttcctcgggaaattggcattgcgattcccaatggctgggggacagagtcatcaccaccagcacccgaacctgggccctgcccacctacaacaatcacctctacaagcaaatctccaacagcacatctggaggatcttcaaatgacaacgcctacttcggctacagcaccccctgggggtattttgacttcaacagattccactgccacttctcaccacgtgactggcagcgactcatcaacaacaactggggattccggcctaagcgactcaacttcaagctcttcaacattcaggtcaaagaggttacggacaacaatggagtcaagaccatcgccaataaccttaccagcacggtccaggtcttcacggactcagactatcagctcccgtacgtgctcgggtcggctcacgagggctgcctcccgccgttcccagcggacgttttcatgattcctcagtacgggtatctgacgcttaatgatggaagccaggccgtgggtcgttcgtccttttactgcctggaatatttcccgtcgcaaatgctaagaacgggtaacaacttccagttcagctacgagtttgagaacgtacctttccatagcagctacgctcacagccaaagcctggaccgactaatgaatccactcatcgaccaatacttgtactatctctcaaagactattaacggttctggacagaatcaacaaacgctaaaattcagtgtggccggacccagcaacatggctgtccagggaagaaactacatacctggacccagctaccgacaacaacgtgtctcaaccactgtgactcaaaacaacaacagcgaatttgcttggcctacggcttcttcttgggctctcaatggacgtaatagcttgatgaatcctggacctgctatggccagccacaaagaaggagaggaccgtttctttcctttgtctggatctttaatttttggcaaacaaggaactggaagagacaacgtggatgcggacaaagtcatgataaccaacgaagaagaaattaaaactactaacccggtagcaacggagtcctatggacaagtggccacaaaccaccagagtgcccaagcacaggcgcagaccggctgggttcaaaaccaaggaatacttccgggtatggtttggcaggacagagatgtgtacctgcaaggacccatttgggccaaaattcctcacacggacggcaactttcacccttctccgctgatgggagggtttggaatgaagcacccgcctcctcagatcctcatcaaaaacacacctgtacctgcggatcctccaacggccttcaacaaggacaagctgaactctttcatcacccagtattctactggccaagtcagcgtggagatcgagtgggagctgcagaaggaaaacagcaagcgctggaacccggagatccagtacacttccaactattacaagtctaataatgttgaatttgctgttaatactgaaggtgtatatagtgaaccccgccccattggcaccagatacctgactcgtaatctg

SEQ ID NO: 320 - protein, 736 aa, synthetic construct
  REGION 1..736: note = Adeno Associated Virus Capsid Protein Variant
MAADGYLPDWLEDNLSEGIREWWALKPGAPQPKANQQHQDNARGLVLPGYKYLGPGNGLDKGEPVNAADAAALEHDKAYDQQLKAGDNPYLKYNHADAEFQERLKEDTSFGGNLGRAVFQAKKRLLEPLGLVEEAAKTAPGKKRPVEQSPQEPDSSAGIGKSGAQPAKKRLNFGQTGDTESVPDPQPIGEPPAAPSGVGSLTMASGGGAPVADNNEGADGVGSSSGNWHCDSQWLGDRVITTSTRTWALPTYNNHLYKQISNSTSGGSSNDNAYFGYSTPWGYFDFNRFHCHFSPRDWQRLINNNWGFRPKRLNFKLFNIQVKEVTDNNGVKTIANNLTSTVQVFTDSDYQLPYVLGSAHEGCLPPFPADVFMIPQYGYLTLNDGSQAVGRSSFYCLEYFPSQMLRTGNNFQFSYEFENVPFHSSYAHSQSLDRLMNPLIDQYLYYLSKTINGSGQNQQTLKFSVAGPSNMAVQGRNYIPGPSYRQQRVSTTVTQNNNSEFAWPTASSWALNGRNSLMNPGPAMASHKEGEDRFFPLSGSLIFGKQGTGRDNVDADKVMITNEEEIKTTNPVATESYGQVATNHQSAQAQAQTGWVQNQGILPGMVWQDRDVYLQGPIWAKIPHTDGNFHPSPLMGGFGMKHPPPQILIKNTPVPADPPTAFNKDKLNSFITQYSTGQVSVEIEWELQKENSKRWNPEIQYTSNYYKSNNVEFAVNTEGVYSEPRPIGTRYLTRNL

SEQ ID NO: 321 - DNA, 2208 bp, synthetic construct
  misc_feature 1..2208: note = Adeno Associated Virus Capsid Protein Variant
  source 1..2208: mol_type = other DNA
atggctgccgatggttatcttccagattggctcgaggacaaccttagtgaaggaattcgcgagtggtgggctttgaaacctggagcccctcaacccaaggcaaatcaacaacatcaagacaacgctcgaggtcttgtgcttccgggttacaaataccttggacccggcaacggactcgacaagggggagccggtcaacgcagcagacgcggcggccctcgagcacgacaaggcctacgaccagcagctcaaggccggagacaacccgtacctcaagtacaaccacgccgacgccgagttccaggagcggctcaaagaagatacgtcttttgggggcaacctcgggcgagcagtcttccaggccaaaaagaggcttcttgaacctcttggtctggttgaggaagcggctaagacggctcctggaaagaagaggcctgtagagcagtctcctcaggaaccggactcctccgcgggtattggcaaatcgggtgcacagcccgctaaaaagagactcaatttcggtcagactggcgacacagagtcagtcccagaccctcaaccaatcggagaacctcccgcagccccctcaggtgtgggatctcttacaatggcttcaggtggtggcgcaccagtggcagacaataacgaaggtgccgatggagtgggtagttcctcgggaaattggcattgcgattcccaatggctgggggacagagtcatcaccaccagcacccgaacctgggccctgcccacctacaacaatcacctctacaagcaaatctccaacagcacatctggaggatcttcaaatgacaacgcctacttcggctacagcaccccctgggggtattttgacttcaacagattccactgccacttctcaccacgtgactggcagcgactcatcaacaacaactggggattccggcctaagcgactcaacttcaagctcttcaacattcaggtcaaagaggttacggacaacaatggagtcaagaccatcgccaataaccttaccagcacggtccaggtcttcacggactcagactatcagctcccgtacgtgctcgggtcggctcacgagggctgcctcccgccgttcccagcggacgttttcatgattcctcagtacgggtatctgacgcttaatgatggaagccaggccgtgggtcgttcgtccttttactgcctggaatatttcccgtcgcaaatgctaagaacgggtaacaacttccagttcagctacgagtttgagaacgtacctttccatagcagctacgctcacagccaaagcctggaccgactaatgaatccactcatcgaccaatacttgtactatctctcaaagactattaacggttctggacagaatcaacaaacgctaaaattcagtgtggccggacccagcaacatggctgtccagggaagaaactacatacctggacccagctaccgacaacaacgtgtctcaaccactgtgactcaaaacaacaacagcgaatttgcttggcctggagcttcttcttgggctctcaatggacgtaatagcttgatgaatcctggacctgctatggccagccacaaagaaggagaggaccgtttctttcctttgtctggatctttaatttttggcaaacaaggaactggaagagacaacgtggatgcggacaaagtcatgataaccaacgaagaagaaattaaaactactaacccggtagcaacggagtcctatggacaagtggccacaaaccaccagagtgcccaagcacaggcgcataccggctgggttcaaaaccaaggaatacttccgggtatggtttggcaggacagagatgtgtacctgcaaggacccatttgggccaaaattcctcacacggacggcaactttcacccttctccgctgatgggagggtttggaatgaagcacccgcctcctcagatcctcatcaaaaacacacctgtacctgcggatcctccaacggccttcaacaaggacaagctgaactctttcatcacccagtattctactggccaagtcagcgtggagatcgagtgggagctgcagaaggaaaacagcaagcgctggaacccggagatccagtacacttccaactattacaagtctaataatgttgaatttgctgttaatactgaaggtgtatatagtgaaccccgccccattggcaccagatacctgactcgtaatctg

SEQ ID NO: 322 - protein, 736 aa, synthetic construct
  REGION 1..736: note = Adeno Associated Virus Capsid Protein Variant
MAADGYLPDWLEDNLSEGIREWWALKPGAPQPKANQQHQDNARGLVLPGYKYLGPGNGLDKGEPVNAADAAALEHDKAYDQQLKAGDNPYLKYNHADAEFQERLKEDTSFGGNLGRAVFQAKKRLLEPLGLVEEAAKTAPGKKRPVEQSPQEPDSSAGIGKSGAQPAKKRLNFGQTGDTESVPDPQPIGEPPAAPSGVGSLTMASGGGAPVADNNEGADGVGSSSGNWHCDSQWLGDRVITTSTRTWALPTYNNHLYKQISNSTSGGSSNDNAYFGYSTPWGYFDFNRFHCHFSPRDWQRLINNNWGFRPKRLNFKLFNIQVKEVTDNNGVKTIANNLTSTVQVFTDSDYQLPYVLGSAHEGCLPPFPADVFMIPQYGYLTLNDGSQAVGRSSFYCLEYFPSQMLRTGNNFQFSYEFENVPFHSSYAHSQSLDRLMNPLIDQYLYYLSKTINGSGQNQQTLKFSVAGPSNMAVQGRNYIPGPSYRQQRVSTTVTQNNNSEFAWPGASSWALNGRNSLMNPGPAMASHKEGEDRFFPLSGSLIFGKQGTGRDNVDADKVMITNEEEIKTTNPVATESYGQVATNHQSAQAQAHTGWVQNQGILPGMVWQDRDVYLQGPIWAKIPHTDGNFHPSPLMGGFGMKHPPPQILIKNTPVPADPPTAFNKDKLNSFITQYSTGQVSVEIEWELQKENSKRWNPEIQYTSNYYKSNNVEFAVNTEGVYSEPRPIGTRYLTRNL

SEQ ID NO: 323 - DNA, 2208 bp, synthetic construct
  misc_feature 1..2208: note = Adeno Associated Virus Capsid Protein Variant
  source 1..2208: mol_type = other DNA
atggctgccgatggttatcttccagattggctcgaggacaaccttagtgaaggaattcgcgagtggtgggctttgaaacctggagcccctcaacccaaggcaaatcaacaacatcaagacaacgctcgaggtcttgtgcttccgggttacaaataccttggacccggcaacggactcgacaagggggagccggtcaacgcagcagacgcggcggccctcgagcacgacaaggcctacgaccagcagctcaaggccggagacaacccgtacctcaagtacaaccacgccgacgccgagttccaggagcggctcaaagaagatacgtcttttgggggcaacctcgggcgagcagtcttccaggccaaaaagaggcttcttgaacctcttggtctggttgaggaagcggctaagacggctcctggaaagaagaggcctgtagagcagtctcctcaggaaccggactcctccgcgggtattggcaaatcgggtgcacagcccgctaaaaagagactcaatttcggtcagactggcgacacagagtcagtcccagaccctcaaccaatcggagaacctcccgcagccccctcaggtgtgggatctcttacaatggcttcaggtggtggcgcaccagtggcagacaataacgaaggtgccgatggagtgggtagttcctcgggaaattggcattgcgattcccaatggctgggggacagagtcatcaccaccagcacccgaacctgggccctgcccacctacaacaatcacctctacaagcaaatctccaacagcacatctggaggatcttcaaatgacaacgcctacttcggctacagcaccccctgggggtattttgacttcaacagattccactgccacttctcaccacgtgactggcagcgactcatcaacaacaactggggattccggcctaagcgactcaacttcaagctcttcaacattcaggtcaaagaggttacggacaacaatggagtcaagaccatcgccaataaccttaccagcacggtccaggtcttcacggactcagactatcagctcccgtacgtgctcgggtcggctcacgagggctgcctcccgccgttcccagcggacgttttcatgattcctcagtacgggtatctgacgcttaatgatggaagccaggccgtgggtcgttcgtccttttactgcctggaatatttcccgtcgcaaatgctaagaacgggtaacaacttccagttcagctacgagtttgagaacgtacctttccatagcagctacgctcacagccaaagcctggaccgactaatgaatccactcatcgaccaatacttgtactatctctcaaagactattaacggttctggacagaatcaacaaacgctaaaattcagtgtggccggacccagcaacatggctgtccagggaagaaactacatacctggacccagctaccgacaacaacgtgtctcaaccactgtgactcaaaacaacaacagcgaatttgcttggcctggagcttcttcttgggctctcaatggacgtaatagcttgatgaatcctggacctgctatggccagccacaaagaaggagaggaccgtttctttcctttgtctggatctttaatttttggcaaacaaggaactggaagagacaacgtggatgcggacaaagtcatgataaccaacgaagaagaaattaaaactactaacccggtagcaacggagtcctatggacaagtggccacaaaccaccagattgcccaagcacaggcgcagaccggctgggttcaaaaccaaggaatacttccgggtatggtttggcaggacagagatgtgtacctgcaaggacccatttgggccaaaattcctcacacggacggcaactttcacccttctccgctgatgggagggtttggaatgaagcacccgcctcctcagatcctcatcaaaaacacacctgtacctgcggatcctccaacggccttcaacaaggacaagctgaactctttcatcacccagtattctactggccaagtcagcgtggagatcgagtgggagctgcagaaggaaaacagcaagcgctggaacccggagatccagtacacttccaactattacaagtctaataatgttgaatttgctgttaatactgaaggtgtatatagtgaaccccgccccattggcaccagatacctgactcgtaatctg

SEQ ID NO: 324 - protein, 736 aa, synthetic construct
  REGION 1..736: note = Adeno Associated Virus Capsid Protein Variant
MAADGYLPDWLEDNLSEGIREWWALKPGAPQPKANQQHQDNARGLVLPGYKYLGPGNGLDKGEPVNAADAAALEHDKAYDQQLKAGDNPYLKYNHADAEFQERLKEDTSFGGNLGRAVFQAKKRLLEPLGLVEEAAKTAPGKKRPVEQSPQEPDSSAGIGKSGAQPAKKRLNFGQTGDTESVPDPQPIGEPPAAPSGVGSLTMASGGGAPVADNNEGADGVGSSSGNWHCDSQWLGDRVITTSTRTWALPTYNNHLYKQISNSTSGGSSNDNAYFGYSTPWGYFDFNRFHCHFSPRDWQRLINNNWGFRPKRLNFKLFNIQVKEVTDNNGVKTIANNLTSTVQVFTDSDYQLPYVLGSAHEGCLPPFPADVFMIPQYGYLTLNDGSQAVGRSSFYCLEYFPSQMLRTGNNFQFSYEFENVPFHSSYAHSQSLDRLMNPLIDQYLYYLSKTINGSGQNQQTLKFSVAGPSNMAVQGRNYIPGPSYRQQRVSTTVTQNNNSEFAWPGASSWALNGRNSLMNPGPAMASHKEGEDRFFPLSGSLIFGKQGTGRDNVDADKVMITNEEEIKTTNPVATESYGQVATNHQIAQAQAQTGWVQNQGILPGMVWQDRDVYLQGPIWAKIPHTDGNFHPSPLMGGFGMKHPPPQILIKNTPVPADPPTAFNKDKLNSFITQYSTGQVSVEIEWELQKENSKRWNPEIQYTSNYYKSNNVEFAVNTEGVYSEPRPIGTRYLTRNL

SEQ ID NO: 325 - DNA, 2208 bp, synthetic construct
  misc_feature 1..2208: note = Adeno Associated Virus Capsid Protein Variant
  source 1..2208: mol_type = other DNA
atggctgccgatggttatcttccagattggctcgaggacaaccttagtgaaggaattcgcgagtggtgggctttgaaacctggagcccctcaacccaaggcaaatcaacaacatcaagacaacgctcgaggtcttgtgcttccgggttacaaataccttggacccggcaacggactcgacaagggggagccggtcaacgcagcagacgcggcggccctcgagcacgacaaggcctacgaccagcagctcaaggccggagacaacccgtacctcaagtacaaccacgccgacgccgagttccaggagcggctcaaagaagatacgtcttttgggggcaacctcgggcgagcagtcttccaggccaaaaagaggcttcttgaacctcttggtctggttgaggaagcggctaagacggctcctggaaagaagaggcctgtagagcagtctcctcaggaaccggactcctccgcgggtattggcaaatcgggtgcacagcccgctaaaaagagactcaatttcggtcagactggcgacacagagtcagtcccagaccctcaaccaatcggagaacctcccgcagccccctcaggtgtgggatctcttacaatggcttcaggtggtggcgcaccagtggcagacaataacgaaggtgccgatggagtgggtagttcctcgggaaattggcattgcgattcccaatggctgggggacagagtcatcaccaccagcacccgaacctgggccctgcccacctacaacaatcacctctacaagcaaatctccaacagcacatctggaggatcttcaaatgacaacgcctacttcggctacagcaccccctgggggtattttgacttcaacagattccactgccacttctcaccacgtgactggcagcgactcatcaacaacaactggggattccggcctaagcgactcaacttcaagctcttcaacattcaggtcaaagaggttacggacaacaatggagtcaagaccatcgccaataaccttaccagcacggtccaggtcttcacggactcagactatcagctcccgtacgtgctcgggtcggctcacgagggctgcctcccgccgttcccagcggacgttttcatgattcctcagtacgggtatctgacgcttaatgatggaagccaggccgtgggtcgttcgtccttttactgcctggaatatttcccgtcgcaaatgctaagaacgggtaacaacttccagttcagctacgagtttgagaacgtacctttccatagcagctacgctcacagccaaagcctggaccgactaatgaatccactcatcgaccaatacttgtactatctctcaaagactattaacggttctggacagaatcaacaaacgctaaaattcagtgtggccggacccagcaacatggctgtccagggaagaaactacatacctggacccagctaccgacaacaacgtgtctcaaccactgtgactcaaaacaacaacagcgaatttgcttggcctggagcttcttcttgggctctcaatggacgtaatagcttgatgaatcctggacctgctatggccagccacaaagaaggagaggaccgtttctttcctttgtctggatctttaatttttggcaaacaaggaactggaagagacaacgtggatgcggacaaagtcatgataaccaacgaagaagaaattaaaactactaacccggtagcaacggagtcctatggacaagtggccacaaaccaccagagtgcccaagcacaggcgcagaccggctgggttcaaaaccaaggaatacttccgggtatggtttggcaggacagagatgtgtacctgcaaggacccatttgggccaaaattcctcacacggacggcaactttcacccttctccgctgatgggagggtttggaatgaagcacccgcctcctcagatcctcatcaaaaacacacctgtacctgcggatcctccaatggccttcaacaaggacaagctgaactctttcatcacccagtattctactggccaagtcagcgtggagatcgagtgggagctgcagaaggaaaacagcaagcgctggaacccggagatccagtacacttccaactattacaagtctaataatgttgaatttgctgttaatactgaaggtgtatatagtgaaccccgccccattggcaccagatacctgactcgtaatctg

SEQ ID NO: 326 - protein, 736 aa, synthetic construct
  REGION 1..736: note = Adeno Associated Virus Capsid Protein Variant
MAADGYLPDWLEDNLSEGIREWWALKPGAPQPKANQQHQDNARGLVLPGYKYLGPGNGLDKGEPVNAADAAALEHDKAYDQQLKAGDNPYLKYNHADAEFQERLKEDTSFGGNLGRAVFQAKKRLLEPLGLVEEAAKTAPGKKRPVEQSPQEPDSSAGIGKSGAQPAKKRLNFGQTGDTESVPDPQPIGEPPAAPSGVGSLTMASGGGAPVADNNEGADGVGSSSGNWHCDSQWLGDRVITTSTRTWALPTYNNHLYKQISNSTSGGSSNDNAYFGYSTPWGYFDFNRFHCHFSPRDWQRLINNNWGFRPKRLNFKLFNIQVKEVTDNNGVKTIANNLTSTVQVFTDSDYQLPYVLGSAHEGCLPPFPADVFMIPQYGYLTLNDGSQAVGRSSFYCLEYFPSQMLRTGNNFQFSYEFENVPFHSSYAHSQSLDRLMNPLIDQYLYYLSKTINGSGQNQQTLKFSVAGPSNMAVQGRNYIPGPSYRQQRVSTTVTQNNNSEFAWPGASSWALNGRNSLMNPGPAMASHKEGEDRFFPLSGSLIFGKQGTGRDNVDADKVMITNEEEIKTTNPVATESYGQVATNHQSAQAQAQTGWVQNQGILPGMVWQDRDVYLQGPIWAKIPHTDGNFHPSPLMGGFGMKHPPPQILIKNTPVPADPPMAFNKDKLNSFITQYSTGQVSVEIEWELQKENSKRWNPEIQYTSNYYKSNNVEFAVNTEGVYSEPRPIGTRYLTRNL

SEQ ID NO: 327 - DNA, 2208 bp, synthetic construct
  misc_feature 1..2208: note = Adeno Associated Virus Capsid Protein Variant
  source 1..2208: mol_type = other DNA
atggctgccgatggttatcttccagattggctcgaggacaaccttagtgaaggaattcgcgagtggtgggctttgaaacctggagcccctcaacccaaggcaaatcaacaacatcaagacaacgctcgaggtcttgtgcttccgggttacaaataccttggacccggcaacggactcgacaagggggagccggtcaacgcagcagacgcggcggccctcgagcacgacaaggcctacgaccagcagctcaaggccggagacaacccgtacctcaagtacaaccacgccgacgccgagttccaggagcggctcaaagaagatacgtcttttgggggcaacctcgggcgagcagtcttccaggccaaaaagaggcttcttgaacctcttggtctggttgaggaagcggctaagacggctcctggaaagaagaggcctgtagagcagtctcctcaggaaccggactcctccgcgggtattggcaaatcgggtgcacagcccgctaaaaagagactcaatttcggtcagactggcgacacagagtcagtcccagaccctcaaccaatcggagaacctcccgcagccccctcaggtgtgggatctcttacaatggcttcaggtggtggcgcaccagtggcagacaataacgaaggtgccgatggagtgggtagttcctcgggaaattggcattgcgattcccaatggctgggggacagagtcatcaccaccagcacccgaacctgggccctgcccacctacaacaatcacctctacaagcaaatctccaacagcacatctggaggatcttcaaatgacaacgcctacttcggctacagcaccccctgggggtattttgacttcaacagattccactgccacttctcaccacgtgactggcagcgactcatcaacaacaactggggattccggcctaagcgactcaacttcaagctcttcaacattcaggtcaaagaggttacggacaacaatggagtcaagaccatcgccaataaccttaccagcacggtccaggtcttcacggactcagactatcagctcccgtacgtgctcgggtcggctcacgagggctgcctcccgccgttcccagcggacgttttcatgattcctcagtacgggtatctgacgcttaatgatggaagccaggccgtgggtcgttcgtccttttactgcctggaatatttcccgtcgcaaatgctaagaacgggtaacaacttccagttcagctacgagtttgagaacgtacctttccatagcagctacgctcacagccaaagcctggaccgactaatgaatccactcatcgaccaatacttgtactatctctcaaagactattaacggttctggacagaattctcaaacgctaaaattcagtgtggccggacccagcaacatggctgtccagggaagaaactacatacctggacccagctaccgacaacaacgtgtctcaaccactgtgactcaaaacaacaacagcgaatttgcttggcctggagcttcttcttgggctctcaatggacgtaatagcttgatgaatcctggacctgctatggccagccacaaagaaggagaggaccgtttctttcctttgtctggatctttaatttttggcaaacaaggaactggaagagacaacgtggatgcggacaaagtcatgataaccaacgaagaagaaattaaaactactaacccggtagcaacggagtcctatggacaagtggccacaaaccaccagagtgcccaagcacaggcgcagaccggctgggttcaaaaccaaggaatacttccgggtatggtttggcaggacagagatgtgtacctgcaaggacccatttgggccaaaattcctcacacggacggcaactttcacccttctccgctgatgggagggtttggaatgaagcacccgcctcctcagatcctcatcaaaaacacacctgtacctgcggatcctccaacggccttcaacaaggacaagctgaactctttcatcacccagtattctactggccaagtcagcgtggagatcgagtgggagctgcagaaggaaaacagcaagcgctggaacccggagatccagtacacttccaactattacaagtctaataatgttgaatttgctgttaatactgaaggtgtatatagtgaaccccgccccattggcaccagatacctgactcgtaatctg

SEQ ID NO: 328 - protein, 736 aa, synthetic construct
  REGION 1..736: note = Adeno Associated Virus Capsid Protein Variant
MAADGYLPDWLEDNLSEGIREWWALKPGAPQPKANQQHQDNARGLVLPGYKYLGPGNGLDKGEPVNAADAAALEHDKAYDQQLKAGDNPYLKYNHADAEFQERLKEDTSFGGNLGRAVFQAKKRLLEPLGLVEEAAKTAPGKKRPVEQSPQEPDSSAGIGKSGAQPAKKRLNFGQTGDTESVPDPQPIGEPPAAPSGVGSLTMASGGGAPVADNNEGADGVGSSSGNWHCDSQWLGDRVITTSTRTWALPTYNNHLYKQISNSTSGGSSNDNAYFGYSTPWGYFDFNRFHCHFSPRDWQRLINNNWGFRPKRLNFKLFNIQVKEVTDNNGVKTIANNLTSTVQVFTDSDYQLPYVLGSAHEGCLPPFPADVFMIPQYGYLTLNDGSQAVGRSSFYCLEYFPSQMLRTGNNFQFSYEFENVPFHSSYAHSQSLDRLMNPLIDQYLYYLSKTINGSGQNSQTLKFSVAGPSNMAVQGRNYIPGPSYRQQRVSTTVTQNNNSEFAWPGASSWALNGRNSLMNPGPAMASHKEGEDRFFPLSGSLIFGKQGTGRDNVDADKVMITNEEEIKTTNPVATESYGQVATNHQSAQAQAQTGWVQNQGILPGMVWQDRDVYLQGPIWAKIPHTDGNFHPSPLMGGFGMKHPPPQILIKNTPVPADPPTAFNKDKLNSFITQYSTGQVSVEIEWELQKENSKRWNPEIQYTSNYYKSNNVEFAVNTEGVYSEPRPIGTRYLTRNL

SEQ ID NO: 329 - DNA, 2208 bp, synthetic construct
  misc_feature 1..2208: note = Adeno Associated Virus Capsid Protein Variant
  source 1..2208: mol_type = other DNA
atggctgccgatggttatcttccagattggctcgaggacaaccttagtgaaggaattcgcgagtggtgggctttgaaacctggagcccctcaacccaaggcaaatcaacaacatcaagacaacgctcgaggtcttgtgcttccgggttacaaataccttggacccggcaacggactcgacaagggggagccggtcaacgcagcagacgcggcggccctcgagcacgacaaggcctacgaccagcagctcaaggccggagacaacccgtacctcaagtacaaccacgccgacgccgagttccaggagcggctcaaagaagatacgtcttttgggggcaacctcgggcgagcagtcttccaggccaaaaagaggcttcttgaacctcttggtctggttgaggaagcggctaagacggctcctggaaagaagaggcctgtagagcagtctcctcaggaaccggactcctccgcgggtattggcaaatcgggtgcacagcccgctaaaaagagactcaatttcggtcagactggcgacacagagtcagtcccagaccctcaaccaatcggagaacctcccgcagccccctcaggtgtgggatctcttacaatggcttcaggtggtggcgcaccagtggcagacaataacgaaggtgccgatggagtgggtagttcctcgggaaattggcattgcgattcccaatggctgggggacagagtcatcaccaccagcacccgaacctgggccctgcccacctacaacaatcacctctacaagcaaatctccaacagcacatctggaggatcttcaaatgacaacgcctacttcggctacagcaccccctgggggtattttgacttcaacagattccactgccacttctcaccacgtgactggcagcgactcatcaacaacaactggggattccggcctaagcgactcaacttcaagctcttcaacattcaggtcaaagaggttacggacaacaatggagtcaagaccatcgccaataaccttaccagcacggtccaggtcttcacggactcagactatcagctcccgtacgtgctcgggtcggctcacgagggctgcctcccgccgttcccagcggacgttttcatgattcctcagtacgggtatctgacgcttaatgatggaagccaggccgtgggtcgttcgtccttttactgcctggaatatttcccgtcgcaaatgctaagaacgggtaacaacttccagttcagctacgagtttgagaacgtacctttccatagcagctacgctcacagccaaagcctggaccgactaatgaatccactcatcgaccaatacttgtactatctctcaaagactattaacggttctggacagaatcaacaaacgctaaaattcagtgtggccggacccagcaacatggctgtccagggaagaaactacatacctggacccagctaccgacaacaacgtgtctcaaccactgtgattcaaaacaacaacagcgaatttgcttggcctggagcttcttcttgggctctcaatggacgtaatagcttgatgaatcctggacctgctatggccagccacaaagaaggagaggaccgtttctttcctttgtctggatctttaatttttggcaaacaaggaactggaagagacaacgtggatgcggacaaagtcatgataaccaacgaagaagaaattaaaactactaacccggtagcaacggagtcctatggacaagtggccacaaaccaccagagtgcccaagcacaggcgcagaccggctgggttcaaaaccaaggaatacttccgggtatggtttggcaggacagagatgtgtacctgcaaggacccatttgggccaaaattcctcacacggacggcaactttcacccttctccgctgatgggagggtttggaatgaagcacccgcctcctcagatcctcatcaaaaacacacctgtacctgcggatcctccaacggccttcaacaaggacaagctgaactctttcatcacccagtattctactggccaagtcagcgtggagatcgagtgggagctgcagaaggaaaacagcaagcgctggaacccggagatccagtacacttccaactattacaagtctaataatgttgaatttgctgttaatactgaaggtgtatatagtgaaccccgccccattggcaccagatacctgactcgtaatctg

SEQ ID NO: 330 - protein, 736 aa, synthetic construct
  REGION 1..736: note = Adeno Associated Virus Capsid Protein Variant
MAADGYLPDWLEDNLSEGIREWWALKPGAPQPKANQQHQDNARGLVLPGYKYLGPGNGLDKGEPVNAADAAALEHDKAYDQQLKAGDNPYLKYNHADAEFQERLKEDTSFGGNLGRAVFQAKKRLLEPLGLVEEAAKTAPGKKRPVEQSPQEPDSSAGIGKSGAQPAKKRLNFGQTGDTESVPDPQPIGEPPAAPSGVGSLTMASGGGAPVADNNEGADGVGSSSGNWHCDSQWLGDRVITTSTRTWALPTYNNHLYKQISNSTSGGSSNDNAYFGYSTPWGYFDFNRFHCHFSPRDWQRLINNNWGFRPKRLNFKLFNIQVKEVTDNNGVKTIANNLTSTVQVFTDSDYQLPYVLGSAHEGCLPPFPADVFMIPQYGYLTLNDGSQAVGRSSFYCLEYFPSQMLRTGNNFQFSYEFENVPFHSSYAHSQSLDRLMNPLIDQYLYYLSKTINGSGQNQQTLKFSVAGPSNMAVQGRNYIPGPSYRQQRVSTTVIQNNNSEFAWPGASSWALNGRNSLMNPGPAMASHKEGEDRFFPLSGSLIFGKQGTGRDNVDADKVMITNEEEIKTTNPVATESYGQVATNHQSAQAQAQTGWVQNQGILPGMVWQDRDVYLQGPIWAKIPHTDGNFHPSPLMGGFGMKHPPPQILIKNTPVPADPPTAFNKDKLNSFITQYSTGQVSVEIEWELQKENSKRWNPEIQYTSNYYKSNNVEFAVNTEGVYSEPRPIGTRYLTRNL

SEQ ID NO: 331 - DNA, 2208 bp, synthetic construct
  misc_feature 1..2208: note = Adeno Associated Virus Capsid Protein Variant
  source 1..2208: mol_type = other DNA
atggctgccgatggttatcttccagattggctcgaggacaaccttagtgaaggaattcgcgagtggtgggctttgaaacctggagcccctcaacccaaggcaaatcaacaacatcaagacaacgctcgaggtcttgtgcttccgggttacaaataccttggacccggcaacggactcgacaagggggagccggtcaacgcagcagacgcggcggccctcgagcacgacaaggcctacgaccagcagctcaaggccggagacaacccgtacctcaagtacaaccacgccgacgccgagttccaggagcggctcaaagaagatacgtcttttgggggcaacctcgggcgagcagtcttccaggccaaaaagaggctgcttgaacctcttggtctggttgaggaagcggctaagacggctcctggaaagaagaggcctgtagagcagtctcctcaggaaccggactcctccgcgggtattggcaaatcgggtgcacagcccgctaaaaagagactcaatttcggtcagactggcgacacagagtcagtcccagaccctcaaccaatcggagaacctcccgcagccccctcaggtgtgggatctcttacaatggcttcaggtggtggcgcaccagtggcagacaataacgaaggtgccgatggagtgggtagttcctcgggaaattggcattgcgattcccaatggctgggggacagagtcatcaccaccagcacccgaacctgggccctgcccacctacaacaatcacctctacaagcaaatctccaacagcacatctggaggatcttcaaatgacaacgcctacttcggctacagcaccccctgggggtattttgacttcaacagattccactgccacttctcaccacgtgactggcagcgactcatcaacaacaactggggattccggcctaagcgactcaacttcaagctcttcaacattcaggtcaaagaggttacggacaacaatggagtcaagaccatcgccaataaccttaccagcacggtccaggtcttcacggactcagactatcagctcccgtacgtgctcgggtcggctcacgagggctgcctcccgccgttcccagcggacgttttcatgattcctcagtacgggtatctgacgcttaatgatggaagccaggccgtgggtcgttcgtccttttactgcctggaatatttcccgtcgcaaatgctaagaacgggtaacaacttccagttcagctacgagtttgagaatgtacctttccatagcagctacgctcacagccaaagcctggaccgactaatgaatccactcatcgaccaatacttgtactatctctcaaagactattaacggttctggacagaatcaacaaacgctaaaattcagtgtcgccggacccagcaacatggctgtccagggaagaaactacattcctggacccagctaccgacaacaacgtgtctcaaccactgtgactcaaaacaacaacagcgaatttgcttggccgggagcttctagttggcatctcaatggacgtaatagcttgatgaatcctggacctgctatggccagccacaaagaaggagaggaccgtttctttcctttgtctggatctttaatttttggcaaacaaggaactggaagagacaacgtggatgcggacaaagtcatgataaccaacgaagaagaaattaaaactactaacccggtagcaacggagtcctatggacaagtggccacaaaccaccagagtgcccaagcacaggcgcagaccggctgggttcaaaaccaaggaatacttccgggtatggtttggcaggacagagatgtgtacctgcaaggacccatttgggccaaaattcctcacacggacggcaactttcacccttctccgctgatgggagggtttggactgaagcacccgcctcctcagatcctcatcaaaaacacacctgtacctgcggatcctccaacggccttcaacaaggacaagctgaactctttcatcacccagtattctactggccaagtcagcgtggagatcgagtgggagctgcagaaggaaaacagcaagcgctggaacccggagatccagtacacttccaactattacaagtctaataatgttgaatttgctgttaatactgaaggtgtatatagtgaaccccgccccattggcaccagatacctgactcgtaatctg

SEQ ID NO: 332 - protein, 736 aa, synthetic construct
  REGION 1..736: note = Adeno Associated Virus Capsid Protein Variant
MAADGYLPDWLEDNLSEGIREWWALKPGAPQPKANQQHQDNARGLVLPGYKYLGPGNGLDKGEPVNAADAAALEHDKAYDQQLKAGDNPYLKYNHADAEFQERLKEDTSFGGNLGRAVFQAKKRLLEPLGLVEEAAKTAPGKKRPVEQSPQEPDSSAGIGKSGAQPAKKRLNFGQTGDTESVPDPQPIGEPPAAPSGVGSLTMASGGGAPVADNNEGADGVGSSSGNWHCDSQWLGDRVITTSTRTWALPTYNNHLYKQISNSTSGGSSNDNAYFGYSTPWGYFDFNRFHCHFSPRDWQRLINNNWGFRPKRLNFKLFNIQVKEVTDNNGVKTIANNLTSTVQVFTDSDYQLPYVLGSAHEGCLPPFPADVFMIPQYGYLTLNDGSQAVGRSSFYCLEYFPSQMLRTGNNFQFSYEFENVPFHSSYAHSQSLDRLMNPLIDQYLYYLSKTINGSGQNQQTLKFSVAGPSNMAVQGRNYIPGPSYRQQRVSTTVTQNNNSEFAWPGASSWHLNGRNSLMNPGPAMASHKEGEDRFFPLSGSLIFGKQGTGRDNVDADKVMITNEEEIKTTNPVATESYGQVATNHQSAQAQAQTGWVQNQGILPGMVWQDRDVYLQGPIWAKIPHTDGNFHPSPLMGGFGLKHPPPQILIKNTPVPADPPTAFNKDKLNSFITQYSTGQVSVEIEWELQKENSKRWNPEIQYTSNYYKSNNVEFAVNTEGVYSEPRPIGTRYLTRNL

SEQ ID NO: 333 - DNA, 2208 bp, synthetic construct
  misc_feature 1..2208: note = Adeno Associated Virus Capsid Protein Variant
  source 1..2208: mol_type = other DNA
atggctgccgatggttatcttccagattggctcgaggacaaccttagtgaaggaattcgcgagtggtgggctttgaaacctggagcccctcaacccaaggcaaatcaacaacatcaagacaacgctcgaggtcttgtgcttccgggttacaaataccttggacccggcaacggactcgacaagggggagccggtcaacgcagcagacgcggcggccctcgagcacgacaaggcctacgaccagcagctcaaggccggagacaacccgtacctcaagtacaaccacgccgacgccgagttccaggagcggctcaaagaagatacgtcttttgggggcaacctcgggcgagcagtcttccaggccaaaaagaggcttcttgaacctcttggtctggttgaggaagcggctaagacggctcctggaaagaagaggcctgtagagcagtctcctcaggaaccggactcctccgcgggtattggcaaatcgggtgcacagcccgctaaaaagagactcaatttcggtcagactggcgacacagagtcagtcccagaccctcaaccaatcggagaacctcccgcagccccctcaggtgtgggatctcttacaatggcttcaggtggtggcgcaccagtggcagacaataacgaaggtgccgatggagtgggtagttcctcgggaaattggcattgcgattccacgtggctgggggacagagtcatcaccaccagcacccgaacctgggccctgcccacctacaacaatcacctctacaagcaaatctccaacagcacatctggaggatcttcaaatgacaacgcctacttcggctacagcaccccctgggggtattttgacttcaacagattccactgccacttctcaccacgtgactggcagcgactcatcaacaacaactggggattccggcctaagcgactcaacttcaagctcttcaacattcaggtcaaagaggttacggacaacaatggagtcaagaccatcgccaataaccttaccagcacggtccaggtcttcacggactcagactatcagctcccgtacgtgctcgggtcggctcacgagggctgcctcccgccgttcccagcggacgttttcatgattcctcagtacgggtatctgacgcttaatgatggaagccaggccgtgggtcgttcgtccttttactgcctggaatatttcccgtcgcaaatgctaagaacgggtaacaacttccagttcagctacgagtttgagaacgtacctttccatagcagctacgctcacagccaaagcctggaccgactaatgaatccactcatcgaccaatacttgtactatctctcaaagactattaacggttctggacagaatcaacaaacgctaaaattcagtgtggccggacccagcaacatggctgtccagggaagaaactacatacctggacccagctaccgacaacaacgtgtctcaaccactgtgactcaaaacaacaacagcgaatttgcttggccgggagcttctaagtgggctctcaatggacgtaatagcttgatgaatcctggacctgctatggccagccacaaagaaggagaggaccgtttctttcctttgtctggatctttaatttttggcaaacaaggaactggaagagacaacgtggatgcggacaaagtcatgataaccaacgaagaagaaattaaaactactaacccggtagcaacggagtcctatggacaagtggccacaaaccaccagagtgcccaagcacaggcgcagaccggctgggttcaaaaccaaggaatacttccgggtatggtttggcaggacagagatgtgtacctgcaaggacccatttgggccaaaattcctcacacggacggcaactttcacccttctccgctgatgggagggtttggaatgaagcacccgcctcctcagatcctcatcaaaaacacacctgtacctgcggatcctccaacggccttcaacaaggacaagctgaactctttcatcacccagtattctactggccaagtcagcgtggagatcgagtgggagctgcagaaggaaaacagcaagcgctggaacccggagatccagtacacttccaactattacaagtctaataatgttgaatttgctgttaatactgaaggtgtatatagtgaaccccgccccattggcaccagatacctgactcgtaatctg

SEQ ID NO: 334 - protein, 736 aa, synthetic construct
  REGION 1..736: note = Adeno Associated Virus Capsid Protein Variant
MAADGYLPDWLEDNLSEGIREWWALKPGAPQPKANQQHQDNARGLVLPGYKYLGPGNGLDKGEPVNAADAAALEHDKAYDQQLKAGDNPYLKYNHADAEFQERLKEDTSFGGNLGRAVFQAKKRLLEPLGLVEEAAKTAPGKKRPVEQSPQEPDSSAGIGKSGAQPAKKRLNFGQTGDTESVPDPQPIGEPPAAPSGVGSLTMASGGGAPVADNNEGADGVGSSSGNWHCDSTWLGDRVITTSTRTWALPTYNNHLYKQISNSTSGGSSNDNAYFGYSTPWGYFDFNRFHCHFSPRDWQRLINNNWGFRPKRLNFKLFNIQVKEVTDNNGVKTIANNLTSTVQVFTDSDYQLPYVLGSAHEGCLPPFPADVFMIPQYGYLTLNDGSQAVGRSSFYCLEYFPSQMLRTGNNFQFSYEFENVPFHSSYAHSQSLDRLMNPLIDQYLYYLSKTINGSGQNQQTLKFSVAGPSNMAVQGRNYIPGPSYRQQRVSTTVTQNNNSEFAWPGASKWALNGRNSLMNPGPAMASHKEGEDRFFPLSGSLIFGKQGTGRDNVDADKVMITNEEEIKTTNPVATESYGQVATNHQSAQAQAQTGWVQNQGILPGMVWQDRDVYLQGPIWAKIPHTDGNFHPSPLMGGFGMKHPPPQILIKNTPVPADPPTAFNKDKLNSFITQYSTGQVSVEIEWELQKENSKRWNPEIQYTSNYYKSNNVEFAVNTEGVYSEPRPIGTRYLTRNL

SEQ ID NO: 335 - DNA, 2208 bp, synthetic construct
  misc_feature 1..2208: note = Adeno Associated Virus Capsid Protein Variant
  source 1..2208: mol_type = other DNA
atggctgccgatggttatcttccagattggctcgaggacaaccttagtgaaggaattcgcgagtggtgggctttgaaacctggagcccctcaacccaaggcaaatcaacaacatcaagacaacgctcgaggtcttgtgcttccgggttacaaataccttggaccctttaacggactcgacaagggggagccggtcaacgcagcagacgcggcggccctcgagcacgacaaggcctacgaccagcagctcaaggccggagacaacccgtacctcaagtacaaccacgccgacgccgagttccaggagcggctcaaagaagatacgtcttttgggggcaacctcgggcgagcagtcttccaggccaaaaagaggcttcttgaacctcttggtctggttgaggaagcggctaagacggctcctggaaagaagaggcctgtagagcagtctcctcaggaaccggactcctccgcgggtattggcaaatcgggtgcacagcccgctaaaaagagactcaatttcggtcagactggcgacacagagtcagtcccagaccctcaaccaatcggagaacctcccgcagccccctcaggtgtgggatctcttacaatggcttcaggtggtggcgcaccagtggcagacaataacgaaggtgccgatggagtgggtagttcctcgggaaattggcattgcgattcccaatggctgggggacagagtcatcaccaccagcacccgaacctgggccctgcccacctacaacaatcacctctacaagcaaatctccaacagcacatctggaggatcttcaaatgacaacgcctacttcggctacagcaccccctgggggtattttgacttcaacagattccactgccacttctcaccacgtgactggcagcgactcatcaacaacaactggggattccggcctaagcgactcaacttcaagctcttcaacattcaggtcaaagaggttacggacaacaatggagtcaagaccatcgccaataaccttaccagcacggtccaggtcttcacggactcagactatcagctcccgtacgtgctcgggtcggctcacgagggctgcctcccgccgttcccagcggacgttttcatgattcctcagtacgggtatctgacgcttaatgatggaagccaggccgtgggtcgttcgtccttttactgcctggaatatttcccgtcgcaaatgctaagaacgggtaacaacttccagttcagctacgagtttgagaacgtacctttccatagcagctacgctcacagccaaagcctggaccgactaatgaatccactcatcgaccaatacttgtactatctctcaaaaactattaacggttctggacagaatcaacaaacgctaaaattcagtgtggccggacccagcaacatggctgtccagggaagaaactacatacctggacccagctaccgacaacaacgtgtctcaaccactgtgactcaaaacaacaacagcgaatttgcttggcctggagcttcttcttgggctctcaatggacgtaatagcttgatgaatcctggacctgctatggccagccacaaagacggagaggaccgtttctttcctttgtctggatctttaatttttggcaaacaaggaactggaagagacaacgtggatgcggacaaagtcatgataaccaacgaagaagaaattaaaactactaacccggtagcaacggagtcctatggacaagtggccacaaaccaccagagtgcccaagcacaggcgcagaccggctgggttcaaaaccaaggaatacttccgggtatggtttggcaggacagagatgtgtacctgcaaggacccatttgggccaaaattcctcacacggacggcaactttcacccttctccgctgatgggagggtttggaatgaagcacccgcctcctcagatcctcatcaaaaacacacctgtacctgcggatcctccaacggccttcaacaaggacaagctgaactctttcatcacccagtattctactggccaagtcagcgtggagatcgagtgggagctgcagaaggaaaacagcaagcgctggaacccggagatccagtacacttccaactattacaagtctaataatgttgaatttgctgttaatactgaaggtgtatatagtgaaccccgccccattggcaccagatacctgactcgtaatctg

SEQ ID NO: 336 - protein, 736 aa, synthetic construct
  REGION 1..736: note = Adeno Associated Virus Capsid Protein Variant
MAADGYLPDWLEDNLSEGIREWWALKPGAPQPKANQQHQDNARGLVLPGYKYLGPFNGLDKGEPVNAADAAALEHDKAYDQQLKAGDNPYLKYNHADAEFQERLKEDTSFGGNLGRAVFQAKKRLLEPLGLVEEAAKTAPGKKRPVEQSPQEPDSSAGIGKSGAQPAKKRLNFGQTGDTESVPDPQPIGEPPAAPSGVGSLTMASGGGAPVADNNEGADGVGSSSGNWHCDSQWLGDRVITTSTRTWALPTYNNHLYKQISNSTSGGSSNDNAYFGYSTPWGYFDFNRFHCHFSPRDWQRLINNNWGFRPKRLNFKLFNIQVKEVTDNNGVKTIANNLTSTVQVFTDSDYQLPYVLGSAHEGCLPPFPADVFMIPQYGYLTLNDGSQAVGRSSFYCLEYFPSQMLRTGNNFQFSYEFENVPFHSSYAHSQSLDRLMNPLIDQYLYYLSKTINGSGQNQQTLKFSVAGPSNMAVQGRNYIPGPSYRQQRVSTTVTQNNNSEFAWPGASSWALNGRNSLMNPGPAMASHKDGEDRFFPLSGSLIFGKQGTGRDNVDADKVMITNEEEIKTTNPVATESYGQVATNHQSAQAQAQTGWVQNQGILPGMVWQDRDVYLQGPIWAKIPHTDGNFHPSPLMGGFGMKHPPPQILIKNTPVPADPPTAFNKDKLNSFITQYSTGQVSVEIEWELQKENSKRWNPEIQYTSNYYKSNNVEFAVNTEGVYSEPRPIGTRYLTRNL

SEQ ID NO: 337 - DNA, 2208 bp, synthetic construct
  misc_feature 1..2208: note = Adeno Associated Virus Capsid Protein Variant
  source 1..2208: mol_type = other DNA
atggctgccgatggttatcttccagattggctcgaggacaaccttagtgaaggaattcgcgagtggtgggctttgaaacctggagcccctcaacccaaggcaaatcaacaacatcaagacaacgctcgaggtcttgtgcttccgggttacaaataccttggacccggcaacggactcgacaagggggagccggtcaacgcagcagacgcggcggccctcgagcacgacaaggcctacgaccagcagctcaaggccggagacaacccgtacctcaagtacaaccacgccgacgccgagttccaggagcggctcaaagaagatacgtcttttgggggcaacctcgggcgagcagtcttccaggccaaaaagaggcttcttgaacctcttggtctggttgaggaagcggctaagacggctcctggaaagaagaggcctgtagagcagtctcctcaggaaccggactcctccgcgggtattggcaaatcgggtgcacagcccgctaaaaagagactcaatttcggtcagactggcgacacagagtcagtcccagaccctcaaccaatcggagaacctcccgcagccccctcaggtgtgggatctcttacaatggcttcaggtggtggcgcaccagtggcagacaataacgaaggtgccgatggagtgggtagttcctcgggaaattggcattgcgattcccaatggctgggggacagagtcatcaccaccagcacccgaacctgggccctgcccacctacaacaatcacctctacaagcaaatctccaacagcacatctggaggatcttcaaatgacaacgcctacttcggctacagcaccccctgggggtattttgacttcaacagattccactgccacttctcaccacgtgactggcagcgactcatcaacaacaactggggattccggcctaagcgactcaacttcaagctcttcaacattcaggtcaaagaggttacggacaacaatggaacgaagaccatcgccaataaccttaccagcacggtccaggtcttcacggactcagactatcagctcccgtacgtgctcgggtcggctcacgagggctgcctcccgccgttcccagcggacgttttcatgattcctcagtacgggtatctgacgcttaatgatggaagccaggccgtgggtcgttcgtccttttactgcctggaatatttcccgtcgcaaatgctaagaacgggtaacaacttccagttcagctacgagtttgagaacgtacctttccatagcagctacgctcacagccaaagcctggaccgactaatgaatccactcatcgaccaatacttgtactatctctcacgcactattaacggttctggacagaatcaacaaacgctaaaattcagtgtggccggacccagcaacatggctgtccagggaagaaactacatacctggacccagttaccgacaacaacgtgtctcaaccactgtgactcaaaacaacaacagcgaatttgcttggcctggagcttcttcttgggctctcaatggacgtaatagcttgatgaatcctggacctgctatggccagccacaaagaaggagaggaccgtttctttcctttgtctggatctttaatttttggcaaacaaggaactggaagagacaacgtggatgcggacaaagtcatgataaccaacgaagaagaaattaaaactactaacccggtagcaacggagtcctatggacaagtggccacaaaccaccagagtgcccaagcacaggcgcagaccggctgggttcaaaaccaaggaatacttccgggtatggtttggcaggacagagatgtgtacctgcaaggacccatttgggccaaaattcctcacacggacggcaactttcacccttctccgctgatgggagggtttggaatgaagcacccgcctcctcagatcctcatcaaaaacacacctgtacctgcggatcctccaacggccttcaacaaggacaagctgaactctttcatcacccagtattctactggccaagtcagcgtggagatcgagtgggagctgcagaaggaaaacagcaagcgctggaacccggagatccagtacacttccaactattacaagtctaataatgttgaatttgctgttaatactgaaggtgtatatagtgaaccccgccccattggcaccagatacctgactcgtaatctg

SEQ ID NO: 338 - protein, 736 aa, synthetic construct
  REGION 1..736: note = Adeno Associated Virus Capsid Protein Variant
MAADGYLPDWLEDNLSEGIREWWALKPGAPQPKANQQHQDNARGLVLPGYKYLGPGNGLDKGEPVNAADAAALEHDKAYDQQLKAGDNPYLKYNHADAEFQERLKEDTSFGGNLGRAVFQAKKRLLEPLGLVEEAAKTAPGKKRPVEQSPQEPDSSAGIGKSGAQPAKKRLNFGQTGDTESVPDPQPIGEPPAAPSGVGSLTMASGGGAPVADNNEGADGVGSSSGNWHCDSQWLGDRVITTSTRTWALPTYNNHLYKQISNSTSGGSSNDNAYFGYSTPWGYFDFNRFHCHFSPRDWQRLINNNWGFRPKRLNFKLFNIQVKEVTDNNGTKTIANNLTSTVQVFTDSDYQLPYVLGSAHEGCLPPFPADVFMIPQYGYLTLNDGSQAVGRSSFYCLEYFPSQMLRTGNNFQFSYEFENVPFHSSYAHSQSLDRLMNPLIDQYLYYLSRTINGSGQNQQTLKFSVAGPSNMAVQGRNYIPGPSYRQQRVSTTVTQNNNSEFAWPGASSWALNGRNSLMNPGPAMASHKEGEDRFFPLSGSLIFGKQGTGRDNVDADKVMITNEEEIKTTNPVATESYGQVATNHQSAQAQAQTGWVQNQGILPGMVWQDRDVYLQGPIWAKIPHTDGNFHPSPLMGGFGMKHPPPQILIKNTPVPADPPTAFNKDKLNSFITQYSTGQVSVEIEWELQKENSKRWNPEIQYTSNYYKSNNVEFAVNTEGVYSEPRPIGTRYLTRNL

SEQ ID NO: 339 - DNA, 2208 bp, synthetic construct
  misc_feature 1..2208: note = Adeno Associated Virus Capsid Protein Variant
  source 1..2208: mol_type = other DNA
atggctgccgatggttatcttccagattggctcgaggacaaccttagtgaaggaattcgcgagtggtgggctttgaaacctggagcccctcaacccaaggcaaatcaacaacatcaagacaacgctcgaggtcttgtgcttccgggttacaaataccttggacccggtaacggactcgacaagggggagccggtcaacgcagcagacgcggcggccctcgagcacgacaaggcctacgaccagcagctcaaggccggagacaacccgtacctcaagtacaaccacgccgacgccgagttccaggagcggctcaaagaagatacgtcttttgggggcaacctcgggcgagcagtcttccaggccaaaaagaggcttcttgaacctcttggtctggttgaggaagcggctaagacggctcctggaaagaagaggcctgtagagcagtctcctcaggaaccggactcctccgcgggtattggcaaatcgggtgcacagcccgctaaaaagagactcaatttcggtcagactggcgacacagagtcagtcccagaccctcaaccaatcggagaacctcccgcagccccctcaggtgtgggatctcttacaatggcttcaggtggtggcgcaccaatggcagacaataacgaaggtgccgatggagtgggtagttcatcgggaaattggcattgcgattcccaatggctgggggacagagtcatcaccaccagcacccgaacctgggccctgcccacctacaacaatcacctctacaagcaaatctccaacagcacatctggaggatcttcaaatgacaacgcctacttcggctacagcaccccctgggggtattttgacttcaacagattccactgccacttctcaccacgtgactggcagcgactcatcaacaacaactggggattccggcctaagcgactcaacttcaagctcttcaacattcaggtcaaagaggttacggacaacaatggagtaaagaccatcgccaataaccttaccagcacggtccaggtcttcacggactcagactatcagctcccgtacgtgctcgggtcggctcacgagggctgcctcccgccgttcccagcggacgttttcatgattcctcagtacgggtatctgacgcttaatgatggaagccaggccgtgggtcgttcgtccttttactgcctggaatatttcccgtcgcaaatgctaagaacgggtaacaacttccagttcagctacgagtttgagaacgtacctttccatagcagctacgctcacagccaaagcctggaccgactaatgaatccactcatcgaccaatacttgtactatctctcaaagactattaacggttctggacagaatcaacaaacgctaaaattcagtgtggccggacccagcaacatggctgtccagggaagaaactacatacctggacccagctaccgacaacaacgtgtctcaaccactgtgactcaaaacaacaacagcgaatttgcttggcctggagctagttcttacgctctcaatggacgtaatagcttgatgaatcctggacctgctatggccagccacaaagaaggagaggaccgtttctttcctttgtctggatctttaatttttggcaaacaaggaactggaagagacaacgtggatgcggacaaagtcatgataaccaacgaagaagaaattaaaactactaacccggtagcaacggagtcctatggacaagtggccacaaaccaccagagtgcccaagcacaggcgcagaccggctgggttcaaaaccaaggaatacttccgggtatggtttggcaggacagagatgtgtacctgcaaggacccatttgggccaaaattcctcacacggacggcaactttcacccttctccgctgatgggagggtttggaatgaagcacccgcctcctcagatcctcatcaaaaacacacctgtacctgcggatcctccaacggccttcaacaaggacaagctgaactctttcatcacccagtattctactggccaagtcagcgtggagatcgagtgggagctgcagaaggaaaacagcaagcgctggaacccggagatccagtacacttccaactattacaagtctaataatgttgactttgctgttaatactgaaggtgtatatagtgaaccccgccccattggcaccagatacctgactcgtaatctg

SEQ ID NO: 340 - protein, 736 aa, synthetic construct
  REGION 1..736: note = Adeno Associated Virus Capsid Protein Variant
MAADGYLPDWLEDNLSEGIREWWALKPGAPQPKANQQHQDNARGLVLPGYKYLGPGNGLDKGEPVNAADAAALEHDKAYDQQLKAGDNPYLKYNHADAEFQERLKEDTSFGGNLGRAVFQAKKRLLEPLGLVEEAAKTAPGKKRPVEQSPQEPDSSAGIGKSGAQPAKKRLNFGQTGDTESVPDPQPIGEPPAAPSGVGSLTMASGGGAPMADNNEGADGVGSSSGNWHCDSQWLGDRVITTSTRTWALPTYNNHLYKQISNSTSGGSSNDNAYFGYSTPWGYFDFNRFHCHFSPRDWQRLINNNWGFRPKRLNFKLFNIQVKEVTDNNGVKTIANNLTSTVQVFTDSDYQLPYVLGSAHEGCLPPFPADVFMIPQYGYLTLNDGSQAVGRSSFYCLEYFPSQMLRTGNNFQFSYEFENVPFHSSYAHSQSLDRLMNPLIDQYLYYLSKTINGSGQNQQTLKFSVAGPSNMAVQGRNYIPGPSYRQQRVSTTVTQNNNSEFAWPGASSYALNGRNSLMNPGPAMASHKEGEDRFFPLSGSLIFGKQGTGRDNVDADKVMITNEEEIKTTNPVATESYGQVATNHQSAQAQAQTGWVQNQGILPGMVWQDRDVYLQGPIWAKIPHTDGNFHPSPLMGGFGMKHPPPQILIKNTPVPADPPTAFNKDKLNSFITQYSTGQVSVEIEWELQKENSKRWNPEIQYTSNYYKSNNVDFAVNTEGVYSEPRPIGTRYLTRNL

SEQ ID NO: 341 - DNA, 2208 bp, synthetic construct
  misc_feature 1..2208: note = Adeno Associated Virus Capsid Protein Variant
  source 1..2208: mol_type = other DNA
atggctgccgatggttatcttccagattggctcgaggacaaccttagtgaaggaattcgcgagtggtgggctttgaaacctggagcccctcaacccaaggcaaatcaacaacatcaagacaacgctcgaggtcttgtgcttccgggttacaaataccttggacccggtaacggactcgacaagggggagccggtcaacgcagcagacgcggcggccctcgagcacgacaaggcctacgaccagcagctcaaggccggagacaacccgtacctcaagtacaaccacgccgacgccgagttccaggagcggctcaaagaagatacgtcttttgggggcaacctcgggcgagcagtcttccaggccaaaaagaggcttcttgaacctcttggtctggttgaggaagcggctaagacggctcctggaaagaagaggcctgtagagcagtctcctcaggaaccggactcctccgcgggtattggcaaatcgggtgcacagcccgctaaaaagagactcaatttcggtcagactggcgacacagagtcagtcccagaccctcaaccaatcggagaacctcccgcagccccctcaggtgtgggatctcttacaatggcttcaggtggtggcgcaccagtggcagacaataacgaaggtgccgatggagtgggtagttcctcgggaaattggcattgcgattcccaatggctgggggacagagtcatcaccaccagcacccgaacctgggccctgcccacctacaacaatcacctctacaagcaaatctccaacagcacatctggaggatcttcaaatgacaacgcctacttcggctacagcaccccctgggggtattttgacttcaacagattccactgccacttctcaccacgtgactggcagcgactcatcaacaacaactggggattccggcctaagcgactcaacttcaagctcttcaacattcaggtcaaagaggttacggacaacaatggaacgaagaccatcgccaataaccttaccagcacggtccaggtcttcacggactcagactatcagctcccgtacgtgctcgggtcggctcacgagggctgcctcccgccgttcccagcggacgttttcatgattcctcagtacgggtatctgacgcttaatgatggaagccaggccgtgggtcgttcgtccttttactgcctggaatatttcccgtcgcaaatgctaagaacgggtaacaacttccagttcagctacacctttgagaacgtacctttccatagcagctacgctcacagccaaagcctggaccgactaatgaatccactcatcgaccaatacttgtactatctctcaaagactattaacggttctggacagaatcaacaaacgctaaaattcagtgtggccggacccagcaacatggctgtccagggaagaaactggatacctggacccagttaccgacaacaacgtgtctcaaccactgtgactcaaaacaacaacagcgaatttgcttggcctggagcttcttcttgggctctcaatggacgtaatagcttgatgaatcctggacctgctatggccagccacaaagaaggagaggaccgtttctttcctttgtctggatctttaatttttggcaaacaaggaactggaagagacaacgtggatgcggacaaagtcatgataaccaacgaagaagaaattaaaactactaacccggtagcaacggagtcctatggacaagtggccacaaaccaccagagtgcccaagcacaggcgcagaccggctgggttcaaaaccaaggaatacttccgggtatggtttggcaggacagagatgtgtacctgcaaggacccatttgggccaaaattcctcacacggacggcaactttcacccttctccgctgatgggagggtttggaatgaagcacccgcctcctcagatcctcatcaaaaacacacctgtacctgcggatcctccaacggccttcaacaaggacaagctgaactctttcatcacccagtattctactggccaagtcagcgtggagatcgagtgggagctgcagaaggaaaacagcaagcgctggaacccggagatccagtacacttccaactattacaagtctaataatgttgaatttgctgttaatactgaaggtgtatatagtgaaccccgccccattggcaccagatacctgactcgtaatctg

SEQ ID NO: 342 - protein, 736 aa, synthetic construct
  REGION 1..736: note = Adeno Associated Virus Capsid Protein Variant
MAADGYLPDWLEDNLSEGIREWWALKPGAPQPKANQQHQDNARGLVLPGYKYLGPGNGLDKGEPVNAADAAALEHDKAYDQQLKAGDNPYLKYNHADAEFQERLKEDTSFGGNLGRAVFQAKKRLLEPLGLVEEAAKTAPGKKRPVEQSPQEPDSSAGIGKSGAQPAKKRLNFGQTGDTESVPDPQPIGEPPAAPSGVGSLTMASGGGAPVADNNEGADGVGSSSGNWHCDSQWLGDRVITTSTRTWALPTYNNHLYKQISNSTSGGSSNDNAYFGYSTPWGYFDFNRFHCHFSPRDWQRLINNNWGFRPKRLNFKLFNIQVKEVTDNNGTKTIANNLTSTVQVFTDSDYQLPYVLGSAHEGCLPPFPADVFMIPQYGYLTLNDGSQAVGRSSFYCLEYFPSQMLRTGNNFQFSYTFENVPFHSSYAHSQSLDRLMNPLIDQYLYYLSKTINGSGQNQQTLKFSVAGPSNMAVQGRNWIPGPSYRQQRVSTTVTQNNNSEFAWPGASSWALNGRNSLMNPGPAMASHKEGEDRFFPLSGSLIFGKQGTGRDNVDADKVMITNEEEIKTTNPVATESYGQVATNHQSAQAQAQTGWVQNQGILPGMVWQDRDVYLQGPIWAKIPHTDGNFHPSPLMGGFGMKHPPPQILIKNTPVPADPPTAFNKDKLNSFITQYSTGQVSVEIEWELQKENSKRWNPEIQYTSNYYKSNNVEFAVNTEGVYSEPRPIGTRYLTRNL

SEQ ID NO: 343 - DNA, 2208 bp, synthetic construct
  misc_feature 1..2208: note = Adeno Associated Virus Capsid Protein Variant
  source 1..2208: mol_type = other DNA
atggctgccgatggttatcttccagattggctcgaggacaaccttagtgaaggaattcgcgagtggtgggctttgaaacctggagcccctcaacccaaggcaaatcaacaacatcaagacaacgctcgaggtcttgtgcttccgggttacaaataccttggacccggcaacggactcgacaagggggagccggtcaacgcagcagacgcggcggccctcgagcacgacaaggcctacgaccagcagctcaaggccggagacaacccgtacctcaagtacaaccacgccgacgccgagttccaggagcggctcaaagaagatacgtcttttgggggcaacctcgggcgagcagtcttccaggccaaaaagaggctgcttgaacctcttggtctggttgaggaagcggctaagacggctcctggaaagaagaggcctgtagagcagtctcctcaggaaccggactcctccgcgggtattggcaaatcgggtgcacagcccgctaaaaagagactcaatttcggtcagactggcgacacagagtcagtcccagaccctcaaccaatcggagaacctcccgcagccccctcaggtgtgggatctcttacaatggcttcaggtggtggcgcaccagtggcagacaataacgaaggtgccgatggagtgggtagttcctcgggaaattggcattgcgattcccaatggctgggggacagagtcatcaccaccagcacccgaacctgggccctgcccacctacaacaatcacctctacaagcaaatctccaacagcacatctggaggatcttcaaatgacaacgcctacttcggctacagcaccccctgggggtattttgacttcaacagattccactgccacttctcaccacgtgactggcagcgactcatcaacaacaactggggattccggcctaagcgactcaacttcaagctcttcaacattcaggtcaaagaggttacggacaacaatggagtcaagaccatcgccaataaccttaccagcacggtccaggtcttcacggactcagactatcagctcccgtacgtgctcgggtcggctcacgagggctgcctcccgccgttcccagcggacgttttcatgattcctcagtacgggtatctgacgcttaatgatggaagccaggccgtgggtcgttcgtccttttactgcctggaatatttcccgtcgcaaatgctaagaacgggtaacaacttccagttcagctacgagtttgagaacgtacctttccatagcagctacgctcacagccaaagcctggaccgactaatgaatccactcatcgaccaatacttgtactatctctcaaagactattaacggttctggacagaatcaacaaacgctaaaattcagtgtggccggacccagcaacatggctgtccagggaagaaactacattcctggacccagctaccgacaacaacgtgtctcaaccactgtgactcaaaacaacaacagcgaatttgcttggcctggagcttcttcttgggctctcaatggacgtaatagcttgatgaatcctggacctgctatggccagccacaaagaaggagaggaccgtttctttcctttgtctggatctttaatttttggcaaacaaggaactggaagagacaacgtggatgcggacaaagtcatgataaccaacgaagaagaaattaaaactactaacccggtagcaacggagtcctatggacaagtggccacaaaccaccagagtgcccaagcacaggcgcagaccggctgggttcaaaaccaaggaatacttccgggtatggtttggcaggacagagatgtgtacctgcaaggacccatttgggccaaaattcctcacacggacggcaactttcacccttctccgctgatgggagggtttggaatgaagcacccgcctcctcagatcctcatcaaaaacacacctgtacctgcggatcctccaacggccttcaacaaggacaagctggcgtctttcatcacccagtattctactggccaagtcagcgtggagatcgagtgggagctgcagaaggaaaacagcaagcgctggaacccggagatccagtacacttccaactattacaagtctaataatgttgaatttgctgttaatactgaaggtgtatatagtgaaccccgccccattggcaccagatacctgactcgtaatctg

SEQ ID NO: 344 - protein, 736 aa, synthetic construct
  REGION 1..736: note = Adeno Associated Virus Capsid Protein Variant
MAADGYLPDWLEDNLSEGIREWWALKPGAPQPKANQQHQDNARGLVLPGYKYLGPGNGLDKGEPVNAADAAALEHDKAYDQQLKAGDNPYLKYNHADAEFQERLKEDTSFGGNLGRAVFQAKKRLLEPLGLVEEAAKTAPGKKRPVEQSPQEPDSSAGIGKSGAQPAKKRLNFGQTGDTESVPDPQPIGEPPAAPSGVGSLTMASGGGAPVADNNEGADGVGSSSGNWHCDSQWLGDRVITTSTRTWALPTYNNHLYKQISNSTSGGSSNDNAYFGYSTPWGYFDFNRFHCHFSPRDWQRLINNNWGFRPKRLNFKLFNIQVKEVTDNNGVKTIANNLTSTVQVFTDSDYQLPYVLGSAHEGCLPPFPADVFMIPQYGYLTLNDGSQAVGRSSFYCLEYFPSQMLRTGNNFQFSYEFENVPFHSSYAHSQSLDRLMNPLIDQYLYYLSKTINGSGQNQQTLKFSVAGPSNMAVQGRNYIPGPSYRQQRVSTTVTQNNNSEFAWPGASSWALNGRNSLMNPGPAMASHKEGEDRFFPLSGSLIFGKQGTGRDNVDADKVMITNEEEIKTTNPVATESYGQVATNHQSAQAQAQTGWVQNQGILPGMVWQDRDVYLQGPIWAKIPHTDGNFHPSPLMGGFGMKHPPPQILIKNTPVPADPPTAFNKDKLASFITQYSTGQVSVEIEWELQKENSKRWNPEIQYTSNYYKSNNVEFAVNTEGVYSEPRPIGTRYLTRNL

SEQ ID NO: 345 - DNA, 2208 bp, synthetic construct
  misc_feature 1..2208: note = Adeno Associated Virus Capsid Protein Variant
  source 1..2208: mol_type = other DNA
atggctgccgatggttatcttccagattggctcgaggacaaccttagtgaaggaattcgcgagtggtgggctttgaaacctggagcccctcaacccaaggcaaatcaacaacatcaagacaacgctcgaggtcttgtgcttccgggttacaaataccttggaccctttaacggactcgacaagggggagccggtcaacgcagcagacgcggcggccctcgagcacgacaaggcctacgaccagcagctcaaggccggagacaacccgtacctcaagtacaaccacgccgacgccgagttccaggagcggctcaaagaagatacgtcttttgggggcaacctcgggcgagcagtcttccaggccaaaaagaggcttcttgaacctcttggtctggttgaggaagcggctaagacggctcctggaaagaagaggcctgtagagcagtctcctcaggaaccggactcctccgcgggtattggcaaatcgggtgcacagcccgctaaaaagagactcaatttcggtcagactggcgacacagagtcagtcccagaccctcaaccaatcggagaacctcccgcagccccctcaggtgtgggatctcttacaatggcttcaggtggtggcgcaccagtggcagacaataacgaaggtgccgatggagtgggtagttcctcgggaaattggcattgcgattcccaatggctgggggacagagtcatcaccaccagcacccgaacctgggccctgcccacctacaacaatcacctctacaagcaaatctccaacagcacatctggaggatcttcaaatgacaacgcctacttcggctacagcaccccctgggggtattttgacttcaacagattccactgccacttctcaccacgtgactggcagcgactcatcaacaacaactggggattccggcctaagcgactcaacttcaagctcttcaacattcaggtcaaagaggttacggacaacaatggagtaaagaccatcgccaataaccttaccagcacggtccaggtcttcacggactcagactatcagctcccgtacgtgctcgggtcggctcacgagggctgcctcccgccgttcccagcggacgttttcatgattcctcagtacgggtatctgacgcttaatgatggaagccaggccgtgggtcgttcgtccttttactgcctggaatatttcccgtcgcaaatgctaagaacgggtaacaacttccagttcagctacgagtttgagaacgtacctttccatagcagctacgctcacagccaaagcctggaccgactaatgaatccactcatcgaccaatacttgtactatctctcaaagactattaacggttctggacagaatcaacaaacgctaaaattcagtgtggccggacccagcaacatggctgtccagggaagaaactacatacctggacccagctaccgacaacaacgtgtctcaaccactgtgactcaaaacaacaacagcgaatttgcttggcctggagctacttcttgggctctcaatggacgtaatagcttgatgaatcctggacctgctatggccagccacaaagaaggagaggaccgtttctttcctttgtctggatctttaatttttggcaaacaaggaactggaagagacaacgtggatgcggacaaagtcatgataaccaacgaagaagaaattaaaactactaacccggtagcaacggagtcctatggacaagtggccacaaaccatcagagtgcccaagcacaggcgcagaccggctgggttcaaaaccaaggaatacttccgggtatggtttggcaggacagagatgtgtacctgcaaggacccatttgggccaaaattcctcacacggacggcaactttcacccttctccgctgatgggagggtttggaatgaagcacccgcctcctcagatcctcatcaaaaacacacctgtacctgcggatcctccaacggccttcaacaaggacaagctgaactctttcatcacccagtattctactggccaagtcagcgtggagatcgagtgggagctgcagaaggaaaacagcaagcgctggaacccggagatccagtacacttccaactattacaagtctaataatgttgaatttgctgttaatactgaaggtgtatatagtgaaccccgccccattggcaccagatacctgactcgtaatctg

SEQ ID NO: 346 - protein, 736 aa, synthetic construct
  REGION 1..736: note = Adeno Associated Virus Capsid Protein Variant
MAADGYLPDWLEDNLSEGIREWWALKPGAPQPKANQQHQDNARGLVLPGYKYLGPFNGLDKGEPVNAADAAALEHDKAYDQQLKAGDNPYLKYNHADAEFQERLKEDTSFGGNLGRAVFQAKKRLLEPLGLVEEAAKTAPGKKRPVEQSPQEPDSSAGIGKSGAQPAKKRLNFGQTGDTESVPDPQPIGEPPAAPSGVGSLTMASGGGAPVADNNEGADGVGSSSGNWHCDSQWLGDRVITTSTRTWALPTYNNHLYKQISNSTSGGSSNDNAYFGYSTPWGYFDFNRFHCHFSPRDWQRLINNNWGFRPKRLNFKLFNIQVKEVTDNNGVKTIANNLTSTVQVFTDSDYQLPYVLGSAHEGCLPPFPADVFMIPQYGYLTLNDGSQAVGRSSFYCLEYFPSQMLRTGNNFQFSYEFENVPFHSSYAHSQSLDRLMNPLIDQYLYYLSKTINGSGQNQQTLKFSVAGPSNMAVQGRNYIPGPSYRQQRVSTTVTQNNNSEFAWPGATSWALNGRNSLMNPGPAMASHKEGEDRFFPLSGSLIFGKQGTGRDNVDADKVMITNEEEIKTTNPVATESYGQVATNHQSAQAQAQTGWVQNQGILPGMVWQDRDVYLQGPIWAKIPHTDGNFHPSPLMGGFGMKHPPPQILIKNTPVPADPPTAFNKDKLNSFITQYSTGQVSVEIEWELQKENSKRWNPEIQYTSNYYKSNNVEFAVNTEGVYSEPRPIGTRYLTRNL

SEQ ID NO: 347 - DNA, 2208 bp, synthetic construct
  misc_feature 1..2208: note = Adeno Associated Virus Capsid Protein Variant
  source 1..2208: mol_type = other DNA
atggctgccgatggttatcttccagattggctcgaggacaaccttagtgaaggaattcgcgagtggtgggctttgaaacctggagcccctcaacccaaggcaaatcaacaacatcaagacaacgctcgaggtcttgtgcttccgggttacaaataccttggaccctttaacggactcgacaagggggagccggtcaacgcagcagacgcggcggccctcgagcacgacaaggcctacgaccagcagctcaaggccggagacaacccgtacctcaagtacaaccacgccgacgccgagttccaggagcggctcaaagaagatacgtcttttgggggcaacctcgggcgagcagtcttccaggccaaaaagaggcttcttgaacctcttggtctggttgaggaagcggctaagacggctcctggaaagaagaggcctgtagagcagtctcctcaggaaccggactcctccgcgggtattggcaaatcgggtgcacagcccgctaaaaagagactcaatttcggtcagactggcgacacagagtcagtcccagaccctcaaccaatcggagaacctcccgcagccccctcaggtgtgggatctcttacaatggcttcaggtggtggcgcaccagtggcagacaataacgaaggtgccgatggagtgggtagttcctcgggaaattggcattgcgattcccaatggctgggggacagagtcatcaccaccagcacccgaacctgggccctgcccacctacaacaatcacctctacaagcaaatctccaacagcacatctggaggatcttcaaatgacaacgcctacttcggctacagcaccccctgggggtattttgacttcaacagattccactgccacttctcaccacgtgactggcagcgactcatcaacaacaactggggattccggcctaagcgactcaacttcaagctcttcaacattcaggtcaaagaggttacggacaacaatggaacgaagaccatcgccaataaccttaccagcacggtccaggtcttcacggactcagactatcagctcccgtacgtgctcgggtcggctcacgagggctgcctcccgccgttcccagcggacgttttcatgattcctcagtacgggtatctgacgcttaatgatggaagccaggccgtgggtcgttcgtccttttactgcctggaatatttcccgtcgcaaatgctaagaacgggtaacaacttccagttcagctacgagtttgagaacgtacctttccatagcagctacgctcacagccaaagcctggaccgactaatgaatccactcatcgaccaatacttgtactatctctcaaagactattaacggttctggacagaatcaacaaacgctaaaattcagtgtggccggacccagcaacatggctgtccagggaagaaactacatacctggacccagctaccgacaacaacgtgtctcaaccactgtgactcaaaacaacaacagcgaatttgcttggcctggagctagttcttgggctctcaatggacgtaatagcttgatgaatcctggacctgctatggccagccacaaagaaggagaggaccgtttctttcctttgtctggatctttaatttttggcaaacaaggaactggaagagacaacgtggatgcggacaaagtcatgataaccaacgaagaagaaattaaaactactaacccggtagcaacggagtcctatggacaagtggccacaaacctgcagagtgcccaagcacaggcgcagaccggctgggttaataaccaaggaatacttccgggtatggtttggcaggacagagatgtgtacctgcaaggacccatttgggccaaaattcctcacacggacggcaactttcacccttctccgctgatgggagggtttggaatgaagcacccgcctcctcagatcctcatcaaaaacacacctgtacctgcggatcctccaacggccttcaacaaggacaagctgaactctttcatcacccagtattctactggccaagtcagcgtggagatcgagtgggagctgcagaaggaaaacagcaagcgctggaacccggagatccagtacacttccaactattacaagtctaataatgttgaatttgctgttaatactgaaggtgtatatagtgaaccccgccccattggcaccagatacctgactcgtaatctg

SEQ ID NO: 348 - protein, 736 aa, synthetic construct
  REGION 1..736: note = Adeno Associated Virus Capsid Protein Variant
MAADGYLPDWLEDNLSEGIREWWALKPGAPQPKANQQHQDNARGLVLPGYKYLGPFNGLDKGEPVNAADAAALEHDKAYDQQLKAGDNPYLKYNHADAEFQERLKEDTSFGGNLGRAVFQAKKRLLEPLGLVEEAAKTAPGKKRPVEQSPQEPDSSAGIGKSGAQPAKKRLNFGQTGDTESVPDPQPIGEPPAAPSGVGSLTMASGGGAPVADNNEGADGVGSSSGNWHCDSQWLGDRVITTSTRTWALPTYNNHLYKQISNSTSGGSSNDNAYFGYSTPWGYFDFNRFHCHFSPRDWQRLINNNWGFRPKRLNFKLFNIQVKEVTDNNGTKTIANNLTSTVQVFTDSDYQLPYVLGSAHEGCLPPFPADVFMIPQYGYLTLNDGSQAVGRSSFYCLEYFPSQMLRTGNNFQFSYEFENVPFHSSYAHSQSLDRLMNPLIDQYLYYLSKTINGSGQNQQTLKFSVAGPSNMAVQGRNYIPGPSYRQQRVSTTVTQNNNSEFAWPGASSWALNGRNSLMNPGPAMASHKEGEDRFFPLSGSLIFGKQGTGRDNVDADKVMITNEEEIKTTNPVATESYGQVATNLQSAQAQAQTGWVNNQGILPGMVWQDRDVYLQGPIWAKIPHTDGNFHPSPLMGGFGMKHPPPQILIKNTPVPADPPTAFNKDKLNSFITQYSTGQVSVEIEWELQKENSKRWNPEIQYTSNYYKSNNVEFAVNTEGVYSEPRPIGTRYLTRNL

SEQ ID NO: 349 - DNA, 2208 bp, synthetic construct
  misc_feature 1..2208: note = Adeno Associated Virus Capsid Protein Variant
  source 1..2208: mol_type = other DNA
atggctgccgatggttatcttccagattggctcgaggacaaccttagtgaaggaattcgcgagtggtgggctttgaaacctggagcccctcaacccaaggcaaatcaacaacatcaagacaacgctcgaggtcttgtgcttccgggttacaaataccttggaccctttaacggactcgacaagggggagccggtcaacgcagcagacgcggcggccctcgagcacgacaaggcctacgaccagcagctcaaggccggagacaacccgtacctcaagtacaaccacgccgacgccgagttccaggagcggctcaaagaagatacgtcttttgggggcaacctcgggcgagcagtcttccaggccaaaaagaggcttcttgaacctcttggtctggttgaggaagcggctaagacggctcctggaaagaagaggcctgtagagcagtctcctcaggaaccggactcctccgcgggtattggcaaatcgggtgcacagcccgctaaaaagagactcaatttcggtcagactggcgacacagagtcagtcccagaccctcaaccaatcggagaacctcccgcagccccctcaggtgtgggatctcttacaatggcttcaggtggtggcgcaccagtggcagacaataacgaaggtgccgatggagtgggtagttcctcgggaaattggcattgcgattcccaatggctgggggacagagtcatcaccaccagcacccgaacctgggccctgcccacctacaacaatcacctctacaagcaaatctccaacagcacatctggaggatcttcaaatgacaacgcctacttcggctacagcaccccctgggggtattttgacttcaacagattccactgccacttctcaccacgtgactggcagcgactcatcaacaacaactggggattccggcctaagcgactcaacttcaagctcttcaacattcaggtcaaagaggttacggacaacaatggagtcaagaccatcgccaataaccttaccagcacggtccaggtcttcacggactcagactatcagctcccgtacgtgctcgggtcggctcacgagggctgcctcccgccgttcccagcggacgttttcatgattcctcagtacgggtatctgacgcttaatgatggaagccaggccgtgggtcgttcgtccttttactgcctggaatatttcccgtcgcaaatgctaagaacgggtaacaacttccagttcagctacgagtttgagaacgtacctttccatagcagctacgctcacagccaaagcctggaccgactaatgaatccactcatcgaccaatacttgtactatctctcaaagactattaacggttctggacagaatcaacaaacgctaaaattcagtgtggccggacccagcaacatggctgtccagggaagaaactggatacctggacccagttaccgacaacaacgtgtctcaaccactgtgactcaaaacaacaacagcgaatttgcttggcctggagcttcttcttgggctctcaatggacgtaatagcttgatgaatcctggacctgctatggccagccacaaagaaggagaggaccgtttctttcctttgtctggatctttaatttttggcaaacaaggaactggaagagacaacgtggatgcggacaaagtcatgataaccaacgaagaagaaattaaaactactaacccggtagcaacggagtcctatggacaagtggccacaaaccatcagagtgcccaagcacaggcgcagaccggctgggttcaaaaccaaggaatacttccgggtatggtttggcaggacagagatgtgtacctgcaaggacccatttgggccaaaattcctcacacggacggcaactttcacccttctccgctgatgggagggtttggaatgaagcacccgcctcctcagatcctcatcaaaaacacacctgtacctgcggatcctccaacggccttcaacaaggacaagctgaactctttcatcacccagtattctactggccaagtcagcgtggagatcgagtgggagctgcagaaggaaaacagcaagcgctggaacccggagatccagtacacttccaactattacaagtctaataatgttgaatttgctgttaatactgaaggtgtatatagtgaaccccgccccattggcaccagatacctgactcgtaatctg

SEQ ID NO: 350 - protein, 736 aa, synthetic construct
  REGION 1..736: note = Adeno Associated Virus Capsid Protein Variant
MAADGYLPDWLEDNLSEGIREWWALKPGAPQPKANQQHQDNARGLVLPGYKYLGPFNGLDKGEPVNAADAAALEHDKAYDQQLKAGDNPYLKYNHADAEFQERLKEDTSFGGNLGRAVFQAKKRLLEPLGLVEEAAKTAPGKKRPVEQSPQEPDSSAGIGKSGAQPAKKRLNFGQTGDTESVPDPQPIGEPPAAPSGVGSLTMASGGGAPVADNNEGADGVGSSSGNWHCDSQWLGDRVITTSTRTWALPTYNNHLYKQISNSTSGGSSNDNAYFGYSTPWGYFDFNRFHCHFSPRDWQRLINNNWGFRPKRLNFKLFNIQVKEVTDNNGVKTIANNLTSTVQVFTDSDYQLPYVLGSAHEGCLPPFPADVFMIPQYGYLTLNDGSQAVGRSSFYCLEYFPSQMLRTGNNFQFSYEFENVPFHSSYAHSQSLDRLMNPLIDQYLYYLSKTINGSGQNQQTLKFSVAGPSNMAVQGRNWIPGPSYRQQRVSTTVTQNNNSEFAWPGASSWALNGRNSLMNPGPAMASHKEGEDRFFPLSGSLIFGKQGTGRDNVDADKVMITNEEEIKTTNPVATESYGQVATNHQSAQAQAQTGWVQNQGILPGMVWQDRDVYLQGPIWAKIPHTDGNFHPSPLMGGFGMKHPPPQILIKNTPVPADPPTAFNKDKLNSFITQYSTGQVSVEIEWELQKENSKRWNPEIQYTSNYYKSNNVEFAVNTEGVYSEPRPIGTRYLTRNL

SEQ ID NO: 351 - DNA, 2208 bp, synthetic construct
  misc_feature 1..2208: note = Adeno Associated Virus Capsid Protein Variant
  source 1..2208: mol_type = other DNA
atggctgccgatggttatcttccagattggctcgaggacaaccttagtgaaggaattcgcgagtggtgggctttgaaacctggagcccctcaacccaaggcaaatcaacaacatcaagacaacgctcgaggtcttgtgcttccgggttacaaataccttggacccggcaacggactcgacaagggggagccggtcaacgcagcagacgcggcggccctcgagcacgacaaggcctacgaccagcagctcaaggccggagacaacccgtacctcaagtacaaccacgccgacgccgagttccaggagcggctcaaagaagatacgtcttttgggggcaacctcgggcgagcagtcttccaggccaaaaagaggctgcttgaacctcttggtctggttgaggaagcggctaagacggctcctggaaagaagaggcctgtagagcagtctcctcaggaaccggactcctccgcgggtattggcaaatcgggtgcacagcccgctaaaaagagactcaatttcggtcagactggcgacacagagtcagtcccagaccctcaaccaatcggagaacctcccgcagccccctcaggtgtgggatctcttacaatggcttcaggtggtggcgcaccagtggcagacaataacgaaggtgccgatggagtgggtagttcctcgggaaattggcattgcgattcccaatggctgggggacagagtcatcaccaccagcacccgaacctgggccctgcccacctacaacaatcacctctacaagcaaatctccaacagcacatctggaggatcttcaaatgacaacgcctacttcggctacagcaccccctgggggtattttgacttcaacagattccactgccacttctcaccacgtgactggcagcgactcatcaacaacaactggggattccggcctaagcgactcaacttcaagctcttcaacattcaggtcaaagaggttacggacaacaatggagtcaagaccatcgccaataaccttaccagcacggtccaggtcttcacggactcagagtatcagctcccgtacgtgctcgggtcggctcacgagggctgcctcccgccgttcccagcggacgttttcatgattcctcagtacgggtatctgacgcttaatgacggaagccaggccgtgggtcgttcgtccttttactgcctggaatatttcccgtcgcaaatgctaagaacgggtaacaacttccagttcagctacgagtttgagaacgtacctttccatagcagctacgctcacagccaaagcctggaccgactaatgaatccactcatcgaccaatacttgtactatctctcaaagactattaacggttctggacagaatcaacaaacgctaaaattcagtcaagccggacccagcaacatggctgtccagggaagaaactacctgcctggacccagctaccgacaacaacgtgtctcaaccactgtgactcaaaacaacaacagcgaatttgcttggacgggagcttctaagtgggctctcaatggacgtaatagcttgatgaatcctggacctgctatggccagccacaaagaaggagaggaccgtttctttcctttgtctggatctttaatttttggcaaacaaggaactggaagagacaacgtggatgcggacaaagtcatgataaccaacgaagaagaaattaaaactactaacccggtagcaacggagtcctatggacaagtggccacaaaccaccagagtgcccaagcacaggcgcagaccggctgggttcaaaaccaaggaatacttccgggtatggtttggcaggacagagatgtgtacctgcaaggacccatttgggccaaaattcctcacacggacggcaactttcacccttctccgctgatgggagggtttggaatgaagcacccgcctcctcagatcctcatcaaaaacacacctgtacctgcggatcctccaacggccttcaacaaggacaagctgaactctttcatcacccagtattctactggccaagtcagcgtggagatcgagtgggagctgcagaaggaaaacagcaagcgctggaacccggagatccagtacacttccaactattacaagtctaataatgttgaatttgctgttaatactgaaggtgtatatagtgaaccccgccccattggcaccagatacctgactcgtaatctg

SEQ ID NO: 352 - protein, 736 aa, synthetic construct
  REGION 1..736: note = Adeno Associated Virus Capsid Protein Variant
MAADGYLPDWLEDNLSEGIREWWALKPGAPQPKANQQHQDNARGLVLPGYKYLGPGNGLDKGEPVNAADAAALEHDKAYDQQLKAGDNPYLKYNHADAEFQERLKEDTSFGGNLGRAVFQAKKRLLEPLGLVEEAAKTAPGKKRPVEQSPQEPDSSAGIGKSGAQPAKKRLNFGQTGDTESVPDPQPIGEPPAAPSGVGSLTMASGGGAPVADNNEGADGVGSSSGNWHCDSQWLGDRVITTSTRTWALPTYNNHLYKQISNSTSGGSSNDNAYFGYSTPWGYFDFNRFHCHFSPRDWQRLINNNWGFRPKRLNFKLFNIQVKEVTDNNGVKTIANNLTSTVQVFTDSEYQLPYVLGSAHEGCLPPFPADVFMIPQYGYLTLNDGSQAVGRSSFYCLEYFPSQMLRTGNNFQFSYEFENVPFHSSYAHSQSLDRLMNPLIDQYLYYLSKTINGSGQNQQTLKFSQAGPSNMAVQGRNYLPGPSYRQQRVSTTVTQNNNSEFAWTGASKWALNGRNSLMNPGPAMASHKEGEDRFFPLSGSLIFGKQGTGRDNVDADKVMITNEEEIKTTNPVATESYGQVATNHQSAQAQAQTGWVQNQGILPGMVWQDRDVYLQGPIWAKIPHTDGNFHPSPLMGGFGMKHPPPQILIKNTPVPADPPTAFNKDKLNSFITQYSTGQVSVEIEWELQKENSKRWNPEIQYTSNYYKSNNVEFAVNTEGVYSEPRPIGTRYLTRNL

SEQ ID NO: 353 - DNA, 2208 bp, synthetic construct
  misc_feature 1..2208: note = Adeno Associated Virus Capsid Protein Variant
  source 1..2208: mol_type = other DNA
atggctgccgatggttatcttccagattggctcgaggacaaccttagtgaaggaattcgcgagtggtgggctttgaaacctggagcccctcaacccaaggcaaatcaacaacatcaagacaacgctcgaggtcttgtgcttccgggttacaaataccttggacccggcaacggactcgacaagggggagccggtcaacgcagcagacgcggcggccctcgagcacgacaaggcctacgaccagcagctcaaggccggagacaacccgtacctcaagtacaaccacgccgacgccgagttccaggagcggctcaaagaagatacgtcttttgggggcaacctcgggcgagcagtcttccaggccaaaaagaggctgcttgaacctcttggtctggttgaggaagcggctaagacggctcctggaaagaagaggcctgtagagcagtctcctcaggaaccggactcctccgcgggtattggcaaatcgggtgcacagcccgctaaaaagagactcaatttcggtcagactggcgacacagagtcagtcccagaccctcaaccaatcggagaacctcccgcagccccctcaggtgtgggatctcttacaatggcttcaggtggtggcgcaccagtggcagacaataacgaaggtgccgatggagtgggtagttcctcgggaaattggcattgcgattcccaatggctgggggacagagtcatcaccaccagcacccgaacctgggccctgcccacctacaacaatcacctctacaagcaaatctccaacagcacatctggaggatcttcaaatgacaacgcctacttcggctacagcaccccctgggggtattttgacttcaacagattccactgccacttctcaccacgtgactggcagcgactcatcaacaacaactggggattccggcctaagcgactcaacttcaagctcttcaacattcaggtcaaagaggttacggacaacaatggagtcaagaccatcgccaataaccttaccagcacggtccaggtcttcacggactcagagtatcagctcccgtacgtgctcgggtcggctcacgagggctgcctcccgccgttcccagcggacgttttcatgattcctcagtacgggtatctgacgcttaatgatggaagccaggccgtgggtcgttcgtccttttactgcctggaatatttcccgtcgcaaatgctaagaacgggtaacaacttccagttcagctacgagtttgagaacgtacctttccatagcagctacgctcacagccaaagcctggaccgactaatgaatccactcatcgaccaatacttgtactatctctcaaagactattaacggttctggacagaatcaacaaacgctaaaattcagtgtggccggacccagcaacatggctgtccagggaagaaactacatacctggacccagctaccgacaacaacgtgtctcaaccactgtgactcaaaacaacaacagcgaatttgcttggcctggagcttcttcttgggctctcaatggacgtaatagcttgatgaatcctggacctgctatggccagccacaaagaaggagaggaccgtttctttcctttgtctggatctttaatttttggcaaacaaggaactggaagagacaacgtggatgcggacaaagtcatgataaccaacgaagaagaaattaaaactactaacccggtagcaacggagtcctatggacaagtggccacaaaccaccagagtgcccaagcacaggcgcagaccggctgggttcaaaaccaaggaatacttccgggtatggtttggcaggacagagatgtgtacctgcaaggacccatttgggccaaaattcctcacacggacggcaactttcacccttctccgctgatgggagggtttggactgaagcacccgcctcctcagatcctcatcaaaaacacacctgtacctgcggatcctccaacggccttcaacaaggacaagctgaactctttcatcacccagtattctactggccaagtcagcgtggagatcgagtgggagctgcagaaggaaaacagcaagcgctggaacccggagatccagtacacttccaactattacaagtctaataatgttgaatttgctgttaatactgaaggtgtatatagtgaaccccgccccattggcaccagatacctgactcgtaatctg

SEQ ID NO: 354 - protein, 736 aa, synthetic construct
  REGION 1..736: note = Adeno Associated Virus Capsid Protein Variant
MAADGYLPDWLEDNLSEGIREWWALKPGAPQPKANQQHQDNARGLVLPGYKYLGPGNGLDKGEPVNAADAAALEHDKAYDQQLKAGDNPYLKYNHADAEFQERLKEDTSFGGNLGRAVFQAKKRLLEPLGLVEEAAKTAPGKKRPVEQSPQEPDSSAGIGKSGAQPAKKRLNFGQTGDTESVPDPQPIGEPPAAPSGVGSLTMASGGGAPVADNNEGADGVGSSSGNWHCDSQWLGDRVITTSTRTWALPTYNNHLYKQISNSTSGGSSNDNAYFGYSTPWGYFDFNRFHCHFSPRDWQRLINNNWGFRPKRLNFKLFNIQVKEVTDNNGVKTIANNLTSTVQVFTDSEYQLPYVLGSAHEGCLPPFPADVFMIPQYGYLTLNDGSQAVGRSSFYCLEYFPSQMLRTGNNFQFSYEFENVPFHSSYAHSQSLDRLMNPLIDQYLYYLSKTINGSGQNQQTLKFSVAGPSNMAVQGRNYIPGPSYRQQRVSTTVTQNNNSEFAWPGASSWALNGRNSLMNPGPAMASHKEGEDRFFPLSGSLIFGKQGTGRDNVDADKVMITNEEEIKTTNPVATESYGQVATNHQSAQAQAQTGWVQNQGILPGMVWQDRDVYLQGPIWAKIPHTDGNFHPSPLMGGFGLKHPPPQILIKNTPVPADPPTAFNKDKLNSFITQYSTGQVSVEIEWELQKENSKRWNPEIQYTSNYYKSNNVEFAVNTEGVYSEPRPIGTRYLTRNL

SEQ ID NO: 355 - DNA, 2208 bp, synthetic construct
  misc_feature 1..2208: note = Adeno Associated Virus Capsid Protein Variant
  source 1..2208: mol_type = other DNA
atggctgccgatggttatcttccagattggctcgaggacaaccttagtgaaggaattcgcgagtggtgggctttgaaacctggagcccctcaacccaaggcaaatcaacaacatcaagacaacgctcgaggtcttgtgcttccgggttacaaataccttggacccggtaacggactcgacaagggggagccggtcaacgcagcagacgcggcggccctcgagcacgacaaggcctacgaccagcagctcaaggccggagacaacccgtacctcaagtacaaccacgccgacgccgagttccaggagcggctcaaagaagatacgtcttttgggggcaacctcgggcgagcagtcttccaggccaaaaagaggcttcttgaacctcttggtctggttgaggaagcggctaagacggctcctggaaagaagaggcctgtagagcagtctcctcaggaaccggactcctccgcgggtattggcaaatcgggtgcacagcccgctaaaaagagactcaatttcggtcagactggcgacacagagtcagtcccagaccctcaaccaatcggagaacctcccgcagccccctcaggtgtgggatctcttacaatggcttcaggtggtggcgcaccagtggcagacaataacgaaggtgccgatggagtgggtagttcctcgggaaattggcattgcgattcccaatggctgggggacagagtcatcaccaccagcacccgaacctgggccctgcccacctacaacaatcacctctacaagcaaatctccaacagcacatctggaggatcttcaaatgacaacgcctacttcggctacagcaccccctgggggtattttgacttcaacagattccactgccacttctcaccacgtgactggcagcgactcatcaacaacaactggggattccggcctaagcgactcaacttcaagctcttcaacattcaggtcaaagaggttacggacaacaatggaacgaagaccatcgccaataaccttaccagcacggtccaggtcttcacggactcagactatcagctcccgtacgtgctcgggtcggctcacgagggctgcctcccgccgttcccagcggacgttttcatgattcctcagtacgggtatctgacgcttaatgatggaagccaggccgtgggtcgttcgtccttttactgcctggaatatttcccgtcgcaaatgctaagaacgggtaacaacttccagttcagctacgagtttgagaacgtacctttccatagcagctacgctcacagccaaagcctggaccgactaatgaatccactcatcgaccaatacttgtactatctctcaaagactattaacggttctggacagaatcaacaaacgctaaaattcagtgtggccggacccagcaacatggctgtccagggaagaaactacatacctggacccagctaccgacaacaacgtgtctcaaccactgtgactcaaaacaacaacagcgaatttgcttggcctggagcttcttcttgggctctcaatggacgtaatagcttgatgaatcctggacctgctatggccagccacaaagaaggagaggaccgtttctttcctttgtctggatctttaatttttggcaaacaaggaactggaagagacaacgtggatgcggacaaagtcatgataaccaacgaagaagaaattaaaactactaacccggtagcaacggagtcctatggacaagtggccacaaacctgcagagtgcccaagcacaggcgcagaccggctgggttaataaccaaggaatacttccgggtatggtttggcaggacagagatgtgtacctgcaaggacccatttgggccaaaattcctcacacggacggcaactttcacccttctccgctgatgggagggtttggaatgaagcacccgcctcctcagatcctcatcaaaaacacacctgtacctgcggatcctccaacggccttcaacaaggacaagctgaactctttcatcacccagtattctactggccaagtcagcgtggagatcgagtgggagctgcagaaggaaaacagcaagcgctggaacccggagatccagtacacttccaactattacaagtctaataatgttgaatttgctgttaatactgaaggtgtatatagtgaaccccgccccattggcaccagatacctgactcgtaatctg

SEQ ID NO: 356 - protein, 736 aa, synthetic construct
  REGION 1..736: note = Adeno Associated Virus Capsid Protein Variant
MAADGYLPDWLEDNLSEGIREWWALKPGAPQPKANQQHQDNARGLVLPGYKYLGPGNGLDKGEPVNAADAAALEHDKAYDQQLKAGDNPYLKYNHADAEFQERLKEDTSFGGNLGRAVFQAKKRLLEPLGLVEEAAKTAPGKKRPVEQSPQEPDSSAGIGKSGAQPAKKRLNFGQTGDTESVPDPQPIGEPPAAPSGVGSLTMASGGGAPVADNNEGADGVGSSSGNWHCDSQWLGDRVITTSTRTWALPTYNNHLYKQISNSTSGGSSNDNAYFGYSTPWGYFDFNRFHCHFSPRDWQRLINNNWGFRPKRLNFKLFNIQVKEVTDNNGTKTIANNLTSTVQVFTDSDYQLPYVLGSAHEGCLPPFPADVFMIPQYGYLTLNDGSQAVGRSSFYCLEYFPSQMLRTGNNFQFSYEFENVPFHSSYAHSQSLDRLMNPLIDQYLYYLSKTINGSGQNQQTLKFSVAGPSNMAVQGRNYIPGPSYRQQRVSTTVTQNNNSEFAWPGASSWALNGRNSLMNPGPAMASHKEGEDRFFPLSGSLIFGKQGTGRDNVDADKVMITNEEEIKTTNPVATESYGQVATNLQSAQAQAQTGWVNNQGILPGMVWQDRDVYLQGPIWAKIPHTDGNFHPSPLMGGFGMKHPPPQILIKNTPVPADPPTAFNKDKLNSFITQYSTGQVSVEIEWELQKENSKRWNPEIQYTSNYYKSNNVEFAVNTEGVYSEPRPIGTRYLTRNL

SEQ ID NO: 357 - DNA, 2208 bp, synthetic construct
  misc_feature 1..2208: note = Adeno Associated Virus Capsid Protein Variant
  source 1..2208: mol_type = other DNA
atggctgccgatggttatcttccagattggctcgaggacaaccttagtgaaggaattcgcgagtggtgggctttgaaacctggagcccctcaacccaaggcaaatcaacaacatcaagacaacgctcgaggtcttgtgcttccgggttacaaataccttggacccggtaacggactcgacaagggggagccggtcaacgcagcagacgcggcggccctcgagcacgacaaggcctacgaccagcagctcaaggccggagacaacccgtacctcaagtacaaccacgccgacgccgagttccaggagcggctcaaagaagatacgtcttttgggggcaacctcgggcgagcagtcttccaggccaaaaagaggcttcttgaacctcttggtctggttgaggaagcggctaagacggctcctggaaagaagaggcctgtagagcagtctcctcaggaaccggactcctccgcgggtattggcaaatcgggtgcacagcccgctaaaaagagactcaatttcggtcagactggcgacacagagtcagtcccagaccctcaaccaatcggagaacctcccgcagccccctcaggtgtgggatctcttacaatggcttcaggtggtggcgcaccagtggcagacaataacgaaggtgccgatggagtgggtagttcctcgggaaattggcattgcgattcccaatggctgggggacagagtcatcaccaccagcacccgaacctgggccctgcccacctacaacaatcacctctacaagcaaatctccaacagcacatctggaggatcttcaaatgacaacgcctacttcggctacagcaccccctgggggtattttgacttcaacagattccactgccacttctcaccacgtgactggcagcgactcatcaacaacaactggggattccggcctaagcgactcaacttcaagctcttcaacattcaggtcaaagaggttacggacaacaatggaacgaagaccatcgccaataaccttaccagcacggtccaggtcttcacggactcagactatcagctcccgtacgtgctcgggtcggctcacgagggctgcctcccgccgttcccagcggacgttttcatgattcctcagtacgggtatctgacgcttaatgatggaagccaggccgtgggtcgttcgtccttttactgcctggaatatttcccgtcgcaaatgctaagaacgggtaacaacttccagttcagctacacctttgagaacgtacctttccatagcagctacgctcacagccaaagcctggaccgactaatgaatccactcatcgaccaatacttgtactatctctcaaagactattaacggttctggacagaatcaacaaacgctaaaattcagtgtggccggacccagcaacatggctgtccagggaagaaactggatacctggaccctgttaccgacaacaacgtgtctcaaccactgtgactcaaaacaacaacagcgaatttgcttggcctggagctacttcttgggctctcaatggacgtaatagcttgatgaatcctggacctgctatggccagccacaaagaaggagaggaccgtttctttcctttgtctggatctttaatttttggcaaacaaggaactggaagagacaacgtggatgcggacaaagtcatgataaccaacgaagaagaaattaaaactactaacccggtagcaacggagtcctatggacaagtggccacaaacctgcagagtgcccaagcacaggcgcagaccggctgggttaataaccaaggaatacttccgggtatggtttggcaggacagagatgtgtacctgcaaggacccatttgggccaaaattcctcacacggacggcaactttcacccttctccgctgatgggagggtttggaatgaagcacccgcctcctcagatcctcatcaaaaacacacctgtacctgcggatcctccaacggccttcaacaaggacaagctgaactctttcatcacccagtattctactggccaagtcagcgtggagatcgagtgggagctgcagaaggaaaacagcaagcgctggaacccggagatccagtacacttccaactattacaagtctaataatgttgaatttgctgttaatactgaaggtgtatatagtgaaccccgccccattggcaccagatacctgactcgtaatctg

SEQ ID NO: 358 - protein, 736 aa, synthetic construct
  REGION 1..736: note = Adeno Associated Virus Capsid Protein Variant
MAADGYLPDWLEDNLSEGIREWWALKPGAPQPKANQQHQDNARGLVLPGYKYLGPGNGLDKGEPVNAADAAALEHDKAYDQQLKAGDNPYLKYNHADAEFQERLKEDTSFGGNLGRAVFQAKKRLLEPLGLVEEAAKTAPGKKRPVEQSPQEPDSSAGIGKSGAQPAKKRLNFGQTGDTESVPDPQPIGEPPAAPSGVGSLTMASGGGAPVADNNEGADGVGSSSGNWHCDSQWLGDRVITTSTRTWALPTYNNHLYKQISNSTSGGSSNDNAYFGYSTPWGYFDFNRFHCHFSPRDWQRLINNNWGFRPKRLNFKLFNIQVKEVTDNNGTKTIANNLTSTVQVFTDSDYQLPYVLGSAHEGCLPPFPADVFMIPQYGYLTLNDGSQAVGRSSFYCLEYFPSQMLRTGNNFQFSYTFENVPFHSSYAHSQSLDRLMNPLIDQYLYYLSKTINGSGQNQQTLKFSVAGPSNMAVQGRNWIPGPCYRQQRVSTTVTQNNNSEFAWPGATSWALNGRNSLMNPGPAMASHKEGEDRFFPLSGSLIFGKQGTGRDNVDADKVMITNEEEIKTTNPVATESYGQVATNLQSAQAQAQTGWVNNQGILPGMVWQDRDVYLQGPIWAKIPHTDGNFHPSPLMGGFGMKHPPPQILIKNTPVPADPPTAFNKDKLNSFITQYSTGQVSVEIEWELQKENSKRWNPEIQYTSNYYKSNNVEFAVNTEGVYSEPRPIGTRYLTRNL

SEQ ID NO: 359 - DNA, 2208 bp, synthetic construct
  misc_feature 1..2208: note = Adeno Associated Virus Capsid Protein Variant
  source 1..2208: mol_type = other DNA
atggctgccgatggttatcttccagattggctcgaggacaaccttagtgaaggaattcgcgagtggtgggctttgaaacctggagcccctcaacccaaggcaaatcaacaacatcaagacaacgctcgaggtcttgtgcttccgggttacaaataccttggaccctttaacggactcgacaagggggagccggtcaacgcagcagacgcggcggccctcgagcacgacaaggcctacgaccagcagctcaaggccggagacaacccgtacctcaagtacaaccacgccgacgccgagttccaggagcggctcaaagaagatacgtcttttgggggcaacctcgggcgagcagtcttccaggccaaaaagaggcttcttgaacctcttggtctggttgaggaagcggctaagacggctcctggaaagaagaggcctgtagagcagtctcctcaggaaccggactcctccgcgggtattggcaaatcgggtgcacagcccgctaaaaagagactcaatttcggtcagactggcgacacagagtcagtcccagaccctcaaccaatcggagaacctcccgcagccccctcaggtgtgggatctcttacaatggcttcaggtggtggcgcaccagtggcagacaataacgaaggtgccgatggagtgggtagttcctcgggaaattggcattgcgattcccaatggctgggggacagagtcatcaccaccagcacccgaacctgggccctgcccacctacaacaatcacctctacaagcaaatctccaacagcacatctggaggatcttcaaatgacaacgcctacttcggctacagcaccccctgggggtattttgacttcaacagattccactgccacttctcaccacgtgactggcagcgactcatcaacaacaactggggattccggcctaagcgactcaacttcaagctcttcaacattcaggtcaaagaggttacggacaacaatggagtcaagaccatcgccaataaccttaccagcacggtccaggtcttcacggactcagactatcagctcccgtacgtgctcgggtcggctcacgagggctgcctcccgccgttcccagcggacgttttcatgattcctcagtacgggtatctgacgcttaatgatggaagccaggccgtgggtcgttcgtccttttactgcctggaatatttcccgtcgcaaatgctaagaacgggtaacaacttccagttcagctacacctttgagaacgtacctttccatagcagctacgctcacagccaaagcctggaccgactaatgaatccactcatcgaccaatacttgtactatctctcaaagactattaacggttctggacagaatcaacaaacgctaaaattcagtgtggccggacccagcaacatggctgtccagggaagaaactacatacctggacccagctaccgacaacaacgtgtctcaaccactgtgactcaaaacaacaacagcgaatttgcttggcctggagcttcttcttgggctctcaatggacgtaatagcttgatgaatcctggacctgctatggccagccacaaagaaggagaggaccgtttctttcctttgtctggatctttaatttttggcaaacaaggaactggaagagacaacgtggatgcggacaaagtcatgataaccaacgaagaagaaattaaaactactaacccggtagcaacggagtcctatggacaagtggccacaaaccatcagagtgcccaagcacaggcgcagaccggctgggttcaaaaccaaggaatacttccgggtatggtttggcaggacagagatgtgtacctgcaaggacccatttgggccaaaattcctcacacggacggcaactttcacccttctccgctgatgggagggtttggaatgaagcacccgcctcctcagatcctcatcaaaaacacacctgtacctgcggatcctccaacggccttcaacaaggacaagctgaactctttcatcacccagtattctactggccaagtcagcgtggagatcgagtgggagctgcagaaggaaaacagcaagcgctggaacccggagatccagtacacttccaactattacaagtctaataatgttgaatttgctgttaatactgaaggtgtatatagtgaaccccgccccattggcaccagatacctgactcgtaatctg

SEQ ID NO: 360 - protein, 736 aa, synthetic construct
  REGION 1..736: note = Adeno Associated Virus Capsid Protein Variant
MAADGYLPDWLEDNLSEGIREWWALKPGAPQPKANQQHQDNARGLVLPGYKYLGPFNGLDKGEPVNAADAAALEHDKAYDQQLKAGDNPYLKYNHADAEFQERLKEDTSFGGNLGRAVFQAKKRLLEPLGLVEEAAKTAPGKKRPVEQSPQEPDSSAGIGKSGAQPAKKRLNFGQTGDTESVPDPQPIGEPPAAPSGVGSLTMASGGGAPVADNNEGADGVGSSSGNWHCDSQWLGDRVITTSTRTWALPTYNNHLYKQISNSTSGGSSNDNAYFGYSTPWGYFDFNRFHCHFSPRDWQRLINNNWGFRPKRLNFKLFNIQVKEVTDNNGVKTIANNLTSTVQVFTDSDYQLPYVLGSAHEGCLPPFPADVFMIPQYGYLTLNDGSQAVGRSSFYCLEYFPSQMLRTGNNFQFSYTFENVPFHSSYAHSQSLDRLMNPLIDQYLYYLSKTINGSGQNQQTLKFSVAGPSNMAVQGRNYIPGPSYRQQRVSTTVTQNNNSEFAWPGASSWALNGRNSLMNPGPAMASHKEGEDRFFPLSGSLIFGKQGTGRDNVDADKVMITNEEEIKTTNPVATESYGQVATNHQSAQAQAQTGWVQNQGILPGMVWQDRDVYLQGPIWAKIPHTDGNFHPSPLMGGFGMKHPPPQILIKNTPVPADPPTAFNKDKLNSFITQYSTGQVSVEIEWELQKENSKRWNPEIQYTSNYYKSNNVEFAVNTEGVYSEPRPIGTRYLTRNL

SEQ ID NO: 361 - DNA, 2208 bp, synthetic construct
  misc_feature 1..2208: note = Adeno Associated Virus Capsid Protein Variant
  source 1..2208: mol_type = other DNA
atggctgccgatggttatcttccagattggctcgaggacaaccttagtgaaggaattcgcgagtggtgggctttgaaacctggagcccctcaacccaaggcaaatcaacaacatcaagacaacgctcgaggtcttgtgcttccgggttacaaataccttggacccggcaacggactcgacaagggggagccggtcaacgcagcagacgcggcggccctcgagcacgacaaggcctacgaccagcagctcaaggccggagacaacccgtacctcaagtacaaccacgccgacgccgagttccaggagcggctcaaagaagatacgtcttttgggggcaacctcgggcgagcagtcttccaggccaaaaagaggctgcttgaacctcttggtctggttgaggaagcggctaagacggctcctggaaagaagaggcctgtagagcagtctcctcaggaaccggactcctccgcgggtattggcaaatcgggtgcacagcccgctaaaaagagactcaatttcggtcagactggcgacacagagtcagtcccagaccctcaaccaatcggagaacctcccgcagccccctcaggtgtgggatctcttacaatggcttcaggtggtggcgcaccagtggcagacaataacgaaggtgccgatggagtgggtagttcctcgggaaattggcattgcgattccacgtggctgggggacagagtcatcaccaccagcacccgaacctgggccctgcccacctacaacaatcacctctacaagcaaatctccaacagcacatctggaggatcttcaaatgacaacgcctacttcggctacagcaccccctgggggtattttgacttcaacagattccactgccacttctcaccacgtgactggcagcgactcatcaacaacaactggggattccggcctaagcgactcaacttcaagctcttcaacattcaggtcaaagaggttacggacaacaatggagtcaagaccatcgccaataaccttaccagcacggtccaggtcttcacggactcagactatcagctcccgtacgtgctcgggtcggctcacgagggctgcctcccgccgttcccagcggacgttttcatgattcctcagtacgggtatctgacgcttaatgacggaagccaggccgtgggtcgttcgtccttttactgcctggaatatttcccgtcgcaaatgctaagaacgggtaacaacttccagttcagctacgagtttgagaacgtacctttccatagcagctacgctcacagccaaagcctggaccgactaatgaatccactcatcgaccaatacttgtactatctctcaaagactattaacggttctggacagaatcaacaaacgctaaaattcagtcaagccggacccagcaacatggctgtccagggaagaaactacattcctggacccagctaccgacaacaacgtgtctcaaccactgtgactcaaaacaacaacagcgaatttgcttggcctggagcttcttcttgggctctcaatggacgtaatagcttgatgaatcctggacctgctatggccagccacaaagaaggtgaggaccgtttctttcctttgtctggatctttaatttttggcaaacaaggaactggaagagacaacgtggatgcggacaaagtcatgataaccaacgaagaagaaattaaaactactaacccggtagcaacggagtcctatggacaagtggccacaaaccaccagagtgcccaagcacaggcgcagaccggctgggttcaaaaccaaggaatacttccgggtatggtttggcaggacagagatgtgtacctgcaaggacccatttgggccaaaattcctcacacggacggcaactttcacccttctccgctgatgggagggtttggactgaagcacccgcctcctcagatcctcatcaaaaacacacctgtacctgcggatcctccaacggccttcaacaaggacaagctgaactctttcatcacccagtattctactggccaagtcagcgtggagatcgagtgggagctgcagaaggaaaacagcaagcgctggaacccggagatccagtacacttccaactattacaagtctaataatgttgaatttgctgttaatactgaaggtgtatatagtgaaccccgccccattggcaccagatacctgactcgtaatctg

SEQ ID NO: 362 - protein, 736 aa, synthetic construct
  REGION 1..736: note = Adeno Associated Virus Capsid Protein Variant
MAADGYLPDWLEDNLSEGIREWWALKPGAPQPKANQQHQDNARGLVLPGYKYLGPGNGLDKGEPVNAADAAALEHDKAYDQQLKAGDNPYLKYNHADAEFQERLKEDTSFGGNLGRAVFQAKKRLLEPLGLVEEAAKTAPGKKRPVEQSPQEPDSSAGIGKSGAQPAKKRLNFGQTGDTESVPDPQPIGEPPAAPSGVGSLTMASGGGAPVADNNEGADGVGSSSGNWHCDSTWLGDRVITTSTRTWALPTYNNHLYKQISNSTSGGSSNDNAYFGYSTPWGYFDFNRFHCHFSPRDWQRLINNNWGFRPKRLNFKLFNIQVKEVTDNNGVKTIANNLTSTVQVFTDSDYQLPYVLGSAHEGCLPPFPADVFMIPQYGYLTLNDGSQAVGRSSFYCLEYFPSQMLRTGNNFQFSYEFENVPFHSSYAHSQSLDRLMNPLIDQYLYYLSKTINGSGQNQQTLKFSQAGPSNMAVQGRNYIPGPSYRQQRVSTTVTQNNNSEFAWPGASSWALNGRNSLMNPGPAMASHKEGEDRFFPLSGSLIFGKQGTGRDNVDADKVMITNEEEIKTTNPVATESYGQVATNHQSAQAQAQTGWVQNQGILPGMVWQDRDVYLQGPIWAKIPHTDGNFHPSPLMGGFGLKHPPPQILIKNTPVPADPPTAFNKDKLNSFITQYSTGQVSVEIEWELQKENSKRWNPEIQYTSNYYKSNNVEFAVNTEGVYSEPRPIGTRYLTRNL

SEQ ID NO: 363 - DNA, 2208 bp, synthetic construct
  misc_feature 1..2208: note = Adeno Associated Virus Capsid Protein Variant
  source 1..2208: mol_type = other DNA
atggctgccgatggttatcttccagattggctcgaggacaaccttagtgaaggaattcgcgagtggtgggctttgaaacctggagcccctcaacccaaggcaaatcaacaacatcaagacaacgctcgaggtcttgtgcttccgggttacaaataccttggacccggcaacggactcgacaagggggagccggtcaacgcagcagacgcggcggccctcgagcacgacaaggcctacgaccagcagctcaaggccggagacaacccgtacctcaagtacaaccacgccgacgccgagttccaggagcggctcaaagaagatacgtcttttgggggcaacctcgggcgagcagtcttccaggccaaaaagagggtgcttgaacctcttggtctggttgaggaagcggctaagacggctcctggaaagaagaggcctgtagagcagtctcctcaggaaccggactcctccgcgggtattggcaaatcgggtgcacagcccgctaaaaagagactcaatttcggtcagactggcgacacagagtcagtcccagaccctcaaccaatcggagaacctcccgcagccccctcaggtgtgggatctcttacaatggcttcaggtggtggcgcaccagtggcagacaataacgaaggtgccgatggagtgggtagttcctcgggaaattggcattgcgattcccaatggctgggggacagagtcatcaccaccagcacccgaacctgggccctgcccacctacaacaatcacctctacaagcaaatctccaacagcacatctggaggatcttcaaatgacaacgcctacttcggctacagcaccccctgggggtattttgacttcaacagattccactgccacttctcaccacgtgactggcagcgactcatcaacaacaactggggattccggcctaagcgactcaacttcaagctcttcaacattcaggtcaaagaggttacggacaacaatggagtcaagaccatcgccaataaccttaccagcacggtccaggtcttcacggactcagactatcagctcccgtacgtgctcgggtcggctcacgagggctgcctcccgccgttcccagcggacgttttcatgattcctcagtacgggtatctgacgcttaatgatggaagccaggccgtgggtcgttcgtccttttactgcctggaatatttcccgtcgcaaatgctaagaacgggtaacaacttccagttcagctacgagtttgagaatgtacctttccatagcagctacgctcacagccaaagcctggaccgactaatgaatccactcatcgaccaatacttgtactatctctcaaagactattaacggttctggacagaatcaacaaacgctaaaattcagtgtcgccggacccagcaacatggctgtccagggaagaaactacattcctggacccagctaccgacaacaacgtgtctcaaccactgtgactcaaaacaacaacagcgaatttgcttggccgggagcttctaagtggcatctcaatggacgtaatagcttgatgaatcctggacctgctatggccagccacaaagaaggagaggaccgtttctttcctttgtctggatctttaatttttggcaaacaaggaactggaagagacaacgtggatgcggacaaagtcatgataaccaacgaagaagaaattaaaactactaacccggtagcaacggagtcctatggacaagtggccacaaaccaccagagtgcccaaactcaggcgcagaccggctgggttcaaaaccaaggaatacttccgggtatggtttggcaggacagagatgtgtacctgcaaggacccatttgggccaaaattcctcacacggacggcaactttcacccttctccgctgatgggagggtttggaatgaagcacccgcctcctcagatcctcatcaaaaacacacctgtacctgcggatcctccaacggccttcaacaaggacaagctgaactctttcatcacccagtattctactggccaagtcagcgtggagatcgagtgggagctgcagaaggaaaacagcaagcgctggaacccggagatccagtacacttccaactattacaagtctaataatgttgaatttgctgttaatactgaaggtgtatatagtgaaccccgccccattggcaccagatacctgactcgtaatctg

SEQ ID NO: 364 - protein, 736 aa, synthetic construct
  REGION 1..736: note = Adeno Associated Virus Capsid Protein Variant
MAADGYLPDWLEDNLSEGIREWWALKPGAPQPKANQQHQDNARGLVLPGYKYLGPGNGLDKGEPVNAADAAALEHDKAYDQQLKAGDNPYLKYNHADAEFQERLKEDTSFGGNLGRAVFQAKKRVLEPLGLVEEAAKTAPGKKRPVEQSPQEPDSSAGIGKSGAQPAKKRLNFGQTGDTESVPDPQPIGEPPAAPSGVGSLTMASGGGAPVADNNEGADGVGSSSGNWHCDSQWLGDRVITTSTRTWALPTYNNHLYKQISNSTSGGSSNDNAYFGYSTPWGYFDFNRFHCHFSPRDWQRLINNNWGFRPKRLNFKLFNIQVKEVTDNNGVKTIANNLTSTVQVFTDSDYQLPYVLGSAHEGCLPPFPADVFMIPQYGYLTLNDGSQAVGRSSFYCLEYFPSQMLRTGNNFQFSYEFENVPFHSSYAHSQSLDRLMNPLIDQYLYYLSKTINGSGQNQQTLKFSVAGPSNMAVQGRNYIPGPSYRQQRVSTTVTQNNNSEFAWPGASKWHLNGRNSLMNPGPAMASHKEGEDRFFPLSGSLIFGKQGTGRDNVDADKVMITNEEEIKTTNPVATESYGQVATNHQSAQTQAQTGWVQNQGILPGMVWQDRDVYLQGPIWAKIPHTDGNFHPSPLMGGFGMKHPPPQILIKNTPVPADPPTAFNKDKLNSFITQYSTGQVSVEIEWELQKENSKRWNPEIQYTSNYYKSNNVEFAVNTEGVYSEPRPIGTRYLTRNL

SEQ ID NO: 365 - DNA, 2208 bp, synthetic construct
  misc_feature 1..2208: note = Adeno Associated Virus Capsid Protein Variant
  source 1..2208: mol_type = other DNA
atggctgccgatggttatcttccagattggctcgaggacaaccttagtgaaggaattcgcgagtggtgggctttgaaacctggagcccctcaacccaaggcaaatcaacaacatcaagacaacgctcgaggtcttgtgcttccgggttacaaataccttggacccggtaacggactcgacaagggggagccggtcaacgcagcagacgcggcggccctcgagcacgacaaggcctacgaccagcagctcaaggccggagacaacccgtacctcaagtacaaccacgccgacgccgagttccaggagcggctcaaagaagatacgtcttttgggggcaacctcgggcgagcagtcttccaggccaaaaagaggcttcttgaacctcttggtctggttgaggaagcggctaagacggctcctggaaagaagaggcctgtagagcagtctcctcaggaaccggactcctccgcgggtattggcaaatcgggtgcacagcccgctaaaaagagactcaatttcggtcagactggcgacacagagtcagtcccagaccctcaaccaatcggagaacctcccgcagccccctcaggtgtgggatctcttacaatggcttcaggtggtggcgcaccagtggcagacaataacgaaggtgccgatggagtgggtagttcctcgggaaattggcattgcgattcccaatggctgggggacagagtcatcaccaccagcacccgaacctgggccctgcccacctacaacaatcacctctacaagcaaatctccaacagcacatctggaggatcttcaaatgacaacgcctacttcggctacagcaccccctgggggtattttgacttcaacagattccactgccacttctcaccacgtgactggcagcgactcatcaacaacaactggggattccggcctaagcgactcaacttcaagctcttcaacattcaggtcaaagaggttacggacaacaatggagtcaagaccatcgccaataaccttaccagcacggtccaggtcttcacggactcagactatcagctcccgtacgtgctcgggtcggctcacgagggctgcctcccgccgttcccagcggacgttttcatgattcctcagtacgggtatctgacgcttaatgatggaagccaggccgtgggtcgttcgtccttttactgcctggaatatttcccgtcgcaaatgctaagaacgggtaacaacttccagttcagctacgagtttgagaacgtacctttccatagcagctacgctcacagccaaagcctggaccgactaatgaatccactcatcgaccaatacttgtactatctctcaaagactattaacggttctggacagaatcaacaaacgctaaaattcagtgtggccggacccagcaacatggctgtccagggaagaaactacatacctggacccagctaccgacaacaacgtgtctcaaccactgtgactcaaaacaacaacagcgaatttgcttggcctggagcttcttcttgggctctcaatggacgtaatagcttgatgaatcctggacctgctatggccagccacaaagaaggagaggaccgtttctttcctttgtctggatctttaatttttggcaaacaaggaactggaagagacaacgtggatgcggacaaagtcatgataaccaacgaagaagaaattaaaactactaacccggtagcaacggagtcctatggacaagtggccacaaaccaccagagtgcccaagcacaggcgcagaccggctgggttaataaccaaggaatacttccgggtatggtttggcaggacagagatgtgtacctgcaaggacccatttgggccaaaattcctcacacggacggcaactttcacccttctccgctgatgggagggtttggaatgaagcacccgcctcctcagatcctcatcaaaaacacacctgtacctgcggatcctccaacggccttcaacaaggacaagctgaactctttcatcacccagtattctactggccaagtcagcgtggagatcgagtgggagctgcagaaggaaaacagcaagcgctggaacccggagatccagtacacttccaactattacaagtctaataatgttgaatttgctgttaatactgaaggtgtatatagtgaaccccgccccattggcaccagatacctgactcgtaatctg

SEQ ID NO: 366 - protein, 736 aa, synthetic construct
  REGION 1..736: note = Adeno Associated Virus Capsid Protein Variant
MAADGYLPDWLEDNLSEGIREWWALKPGAPQPKANQQHQDNARGLVLPGYKYLGPGNGLDKGEPVNAADAAALEHDKAYDQQLKAGDNPYLKYNHADAEFQERLKEDTSFGGNLGRAVFQAKKRLLEPLGLVEEAAKTAPGKKRPVEQSPQEPDSSAGIGKSGAQPAKKRLNFGQTGDTESVPDPQPIGEPPAAPSGVGSLTMASGGGAPVADNNEGADGVGSSSGNWHCDSQWLGDRVITTSTRTWALPTYNNHLYKQISNSTSGGSSNDNAYFGYSTPWGYFDFNRFHCHFSPRDWQRLINNNWGFRPKRLNFKLFNIQVKEVTDNNGVKTIANNLTSTVQVFTDSDYQLPYVLGSAHEGCLPPFPADVFMIPQYGYLTLNDGSQAVGRSSFYCLEYFPSQMLRTGNNFQFSYEFENVPFHSSYAHSQSLDRLMNPLIDQYLYYLSKTINGSGQNQQTLKFSVAGPSNMAVQGRNYIPGPSYRQQRVSTTVTQNNNSEFAWPGASSWALNGRNSLMNPGPAMASHKEGEDRFFPLSGSLIFGKQGTGRDNVDADKVMITNEEEIKTTNPVATESYGQVATNHQSAQAQAQTGWVNNQGILPGMVWQDRDVYLQGPIWAKIPHTDGNFHPSPLMGGFGMKHPPPQILIKNTPVPADPPTAFNKDKLNSFITQYSTGQVSVEIEWELQKENSKRWNPEIQYTSNYYKSNNVEFAVNTEGVYSEPRPIGTRYLTRNL

SEQ ID NO: 367 - DNA, 2208 bp, synthetic construct
  misc_feature 1..2208: note = Adeno Associated Virus Capsid Protein Variant
  source 1..2208: mol_type = other DNA
atggctgccgatggttatcttccagattggctcgaggacaaccttagtgaaggaattcgcgagtggtgggctttgaaacctggagcccctcaacccaaggcaaatcaacaacatcaagacaacgctcgaggtcttgtgcttccgggttacaaataccttggacccggcaacggactcgacaagggggagccggtcaacgcagcagacgcggcggccctcgagcacgacaaggcctacgaccagcagctcaaggccggagacaacccgtacctcaagtacaaccacgccgacgccgagttccaggagcggctcaaagaagatacgtcttttgggggcaacctcgggcgagcagtcttccaggccaaaaagaggcttcttgaacctcttggtctggttgaggaagcggctaagacggctcctggaaagaagaggcctgtagagcagtctcctcaggaaccggactcctccgcgggtattggcaaatcgggtgcacagcccgctaaaaagagactcaatttcggtcagactggcgacacagagtcagtcccagaccctcaaccaatcggagaacctcccgcagccccctcaggtgtgggatctcttacaatggcttcaggtggtggcgcaccagtggcagacaataacgaaggtgccgatggagtgggtagttcctcgggaaattggcattgcgattcccaatggctgggggacagagtcatcaccaccagcacccgaacctgggccctgcccacctacaacaatcacctctacaagcaaatctccaacagcacatctggaggatcttcaaatgacaacgcctacttcggctacagcaccccctgggggtattttgacttcaacagattccactgccacttctcaccacgtgactggcagcgactcatcaacaacaactggggattccggcctaagcgactcaacttcaagctcttcaacattcaggtcaaagaggttacggacaacaatggaacgaagaccatcgccaataaccttaccagcacggtccaggtcttcacggactcagactatcagctcccgtacgtgctcgggtcggctcacgagggctgcctcccgccgttcccagcggacgttttcatgattcctcagtacgggtatctgacgcttaatgatggaagccaggccgtgggtcgttcgtccttttactgcctggaatatttcccgtcgcaaatgctaagaacgggtaacaacttccagttcagctacgagtttgagaacgtacctttccatagcagctacgctcacagccaaagcctggaccgactaatgaatccactcatcgaccaatacttgtactatctctcaaaaactattaacggttctggacagaatcaacaaacgctaaaattcagtgtggccggacccagcaacatggctgtccagggaagaaactacatacctggacccagctaccgacaacaacgtgtctcaaccactgtgactcaaaacaacaacagcgaatttgcttggcctggagctagttcttgggctctcaatggacgtaatagcttgatgaatcctggacctgctatggccagccacaaagaaggagaggaccgtttctttcctttgtctggatctttaatttttggcaaacaaggaactggaagagacaacgtggatgcggacaaagtcatgataaccaacgaagaagaaattaaaactactaacccggtagcaacggagtcctatggacaagtggccacaaaccaccagagtgcccaagcacaggcgcagaccggctgggttaataaccaaggaatacttccgggtatggtttggcaggacagagatgtgtacctgcaaggacccatttgggccaaaattcctcacacggacggcaactttcacccttctccgctgatgggagggtttggaatgaagcacccgcctcctcagatcctcatcaaaaacacacctgtacctgcggatcctccaacggccttcaacaaggacaagctgaactctttcatcacccagtattctactggccaagtcagcgtggagatcgagtgggagctgcagaaggaaaacagcaagcgctggaacccggagatccagtacacttccaactattacaagtctaataatgttgagtttgctgttaatactgaaggtgtatatagtgaaccccgccccattggcaccagatacctgactcgtaatctg

SEQ ID NO: 368 - protein, 736 aa, synthetic construct
  REGION 1..736: note = Adeno Associated Virus Capsid Protein Variant
MAADGYLPDWLEDNLSEGIREWWALKPGAPQPKANQQHQDNARGLVLPGYKYLGPGNGLDKGEPVNAADAAALEHDKAYDQQLKAGDNPYLKYNHADAEFQERLKEDTSFGGNLGRAVFQAKKRLLEPLGLVEEAAKTAPGKKRPVEQSPQEPDSSAGIGKSGAQPAKKRLNFGQTGDTESVPDPQPIGEPPAAPSGVGSLTMASGGGAPVADNNEGADGVGSSSGNWHCDSQWLGDRVITTSTRTWALPTYNNHLYKQISNSTSGGSSNDNAYFGYSTPWGYFDFNRFHCHFSPRDWQRLINNNWGFRPKRLNFKLFNIQVKEVTDNNGTKTIANNLTSTVQVFTDSDYQLPYVLGSAHEGCLPPFPADVFMIPQYGYLTLNDGSQAVGRSSFYCLEYFPSQMLRTGNNFQFSYEFENVPFHSSYAHSQSLDRLMNPLIDQYLYYLSKTINGSGQNQQTLKFSVAGPSNMAVQGRNYIPGPSYRQQRVSTTVTQNNNSEFAWPGASSWALNGRNSLMNPGPAMASHKEGEDRFFPLSGSLIFGKQGTGRDNVDADKVMITNEEEIKTTNPVATESYGQVATNHQSAQAQAQTGWVNNQGILPGMVWQDRDVYLQGPIWAKIPHTDGNFHPSPLMGGFGMKHPPPQILIKNTPVPADPPTAFNKDKLNSFITQYSTGQVSVEIEWELQKENSKRWNPEIQYTSNYYKSNNVEFAVNTEGVYSEPRPIGTRYLTRNL

SEQ ID NO: 369 - DNA, 2208 bp, synthetic construct
  misc_feature 1..2208: note = Adeno Associated Virus Capsid Protein Variant
  source 1..2208: mol_type = other DNA
atggctgccgatggttatcttccagattggctcgaggacaaccttagtgaaggaattcgcgagtggtgggctttgaaacctggagcccctcaacccaaggcaaatcaacaacatcaagacaacgctcgaggtcttgtgcttccgggttacaaataccttggacccggtaacggactcgacaagggggagccggtcaacgcagcagacgcggcggccctcgagcacgacaaggcctacgaccagcagctcaaggccggagacaacccgtacctcaagtacaaccacgccgacgccgagttccaggagcggctcaaagaagatacgtcttttgggggcaacctcgggcgagcagtcttccaggccaaaaagaggcttcttgaacctcttggtctggttgaggaagcggctaagacggctcctggaaagaagaggcctgtagagcagtctcctcaggaaccggactcctccgcgggtattggcaaatcgggtgcacagcccgctaaaaagagactcaatttcggtcagactggcgacacagagtcagtcccagaccctcaaccaatcggagaacctcccgcagccccctcaggtgtgggatctcttacaatggcttcaggtggtggcgcaccagtggcagacaataacgaaggtgccgatggagtgggtagttcctcgggaaattggcattgcgattcccaatggctgggggacagagtcatcaccaccagcacccgaacctgggccctgcccacctacaacaatcacctctacaagcaaatctccaacagcacatctggaggatcttcaaatgacaacgcctacttcggctacagcaccccctgggggtattttgacttcaacagattccactgccacttctcaccacgtgactggcagcgactcatcaacaacaactggggattccggcctaagcgactcaacttcaagctcttcaacattcaggtcaaagaggttacggacaacaatggagtcaagaccatcgccaataaccttaccagcacggtccaggtcttcacggactcagactatcagctcccgtacgtgctcgggtcggctcacgagggctgcctcccgccgttcccagcggacgttttcatgattcctcagtacgggtatctgacgcttaatgatggaagccaggccgtgggtcgttcgtccttttactgcctggaatatttcccgtcgcaaatgctaagaacgggtaacaacttccagttcagctacgagtttgagaacgtacctttccatagcagctacgctcacagccaaagcctggaccgactaatgaatccactcatcgaccaatacttgtactatctctcaaagactattaacggttctggacagaatcaacaaacgctaaaattcagtgtggccggacccagcaacatggctgtccagggaagaaactacatacctggacccagttaccgacaacaacgtgtctcaaccactgtgactcaaaacaacaacagcgaatttgcttggcctggagcttcttcttgggctctcaatggacgtaatagcttgatgaatcctggacctgctatggccagccacaaagaaggagaggaccgtttctttcctttgtctggatctttaatttttggcaaacaaggaactggaagagacaacgtggatgcggacaaagtcatgataaccaacgaagaagaaattaaaactactaacccggtagcaacggagtcctatggacaagtggccacaaaccaccagagtgcccaagcacaggcgcagaccggctgggttcaaaaccaaggaatacttccgggtatggtttggcaggacagagatgtgtacctgcaaggacccatttgggccaaaattcctcacacggacggcaactttcacccttctccgctgatgggagggtttggaatgaagcacccgcctcctcagatcctcatcaaaaacacacctgtacctgcggatcctccaacggccttcaacaaggccaagctgaactctttcatcacccagtattctactggccaagtcagcgtggagatcgagtgggagctgcagaaggaaaacagcaagcgctggaacccggagatccagtacacttccaactattacaagtctaataatgttgaatttgctgttaatactgaaggtgtatatagtgaaccccgccccattggcaccagatacctgactcgtaatctg

SEQ ID NO: 370 - protein, 736 aa, synthetic construct
  REGION 1..736: note = Adeno Associated Virus Capsid Protein Variant
MAADGYLPDWLEDNLSEGIREWWALKPGAPQPKANQQHQDNARGLVLPGYKYLGPGNGLDKGEPVNAADAAALEHDKAYDQQLKAGDNPYLKYNHADAEFQERLKEDTSFGGNLGRAVFQAKKRLLEPLGLVEEAAKTAPGKKRPVEQSPQEPDSSAGIGKSGAQPAKKRLNFGQTGDTESVPDPQPIGEPPAAPSGVGSLTMASGGGAPVADNNEGADGVGSSSGNWHCDSQWLGDRVITTSTRTWALPTYNNHLYKQISNSTSGGSSNDNAYFGYSTPWGYFDFNRFHCHFSPRDWQRLINNNWGFRPKRLNFKLFNIQVKEVTDNNGVKTIANNLTSTVQVFTDSDYQLPYVLGSAHEGCLPPFPADVFMIPQYGYLTLNDGSQAVGRSSFYCLEYFPSQMLRTGNNFQFSYEFENVPFHSSYAHSQSLDRLMNPLIDQYLYYLSKTINGSGQNQQTLKFSVAGPSNMAVQGRNYIPGPSYRQQRVSTTVTQNNNSEFAWPGASSWALNGRNSLMNPGPAMASHKEGEDRFFPLSGSLIFGKQGTGRDNVDADKVMITNEEEIKTTNPVATESYGQVATNHQSAQAQAQTGWVQNQGILPGMVWQDRDVYLQGPIWAKIPHTDGNFHPSPLMGGFGMKHPPPQILIKNTPVPADPPTAFNKAKLNSFITQYSTGQVSVEIEWELQKENSKRWNPEIQYTSNYYKSNNVEFAVNTEGVYSEPRPIGTRYLTRNL

SEQ ID NO: 371 - DNA, 2208 bp, synthetic construct
  misc_feature 1..2208: note = Adeno Associated Virus Capsid Protein Variant
  source 1..2208: mol_type = other DNA
atggctgccgatggttatcttccagattggctcgaggacaaccttagtgaaggaattcgcgagtggtgggctttgaaacctggagcccctcaacccaaggcaaatcaacaacatcaagacaacgctcgaggtcttgtgcttccgggttacaaataccttggaccctttaacggactcgacaagggggagccggtcaacgcagcagacgcggcggccctcgagcacgacaaggcctacgaccagcagctcaaggccggagacaacccgtacctcaagtacaaccacgccgacgccgagttccaggagcggctcaaagaagatacgtcttttgggggcaacctcgggcgagcagtcttccaggccaaaaagaggcttcttgaacctcttggtctggttgaggaagcggctaagacggctcctggaaagaagaggcctgtagagcagtctcctcaggaaccggactcctccgcgggtattggcaaatcgggtgcacagcccgctaaaaagagactcaatttcggtcagactggcgacacagagtcagtcccagaccctcaaccaatcggagaacctcccgcagccccctcaggtgtgggatctcttacaatggcttcaggtggtggcgcaccagtggcagacaataacgaaggtgccgatggagtgggtagttcctcgggaaattggcattgcgattcccaatggctgggggacagagtcatcaccaccagcacccgaacctgggccctgcccacctacaacaatcacctctacaagcaaatctccaacagcacatctggaggatcttcaaatgacaacgcctacttcggctacagcaccccctgggggtattttgacttcaacagattccactgccacttctcaccacgtgactggcagcgactcatcaacaacaactggggattccggcctaagcgactcaacttcaagctcttcaacattcaggtcaaagaggttacggacaacaatggaacgaagaccatcgccaataaccttaccagcacggtccaggtcttcacggactcagactatcagctcccgtacgtgctcgggtcggctcacgagggctgcctcccgccgttcccagcggacgttttcatgattcctcagtacgggtatctgacgcttaatgatggaagccaggccgtgggtcgttcgtccttttactgcctggaatatttcccgtcgcaaatgctaagaacgggtaacaacttccagttcagctacacctttgagaacgtacctttccatagcagctacgctcacagccaaagcctggaccgactaatgaatccactcatcgaccaatacttgtactatctctcaaagactattaacggttctggacagaatcaacaaacgctaaaattcagtgtggccggacccagcaacatggctgtccagggaagaaactacatacctggacccagctaccgacaacaacgtgtctcaaccactgtgactcaaaacaacaacagcgaatttgcttggcctggagcttcttcttgggctctcaatggacgtaatagcttgatgaatcctggacctgctatggccagccacaaagaaggagaggaccgtttctttcctttgtctggatctttaatttttggcaaacaaggaactggaagagacaacgtggatgcggacaaagtcatgataaccaacgaagaagaaattaaaactactaacccggtagcaacggagtcctatggacaagtggccacaaaccaccagagtgcccaagcacaggcgcagaccggctgggttcaaaaccaaggaatacttccgggtatggtttggcaggacagagatgtgtacctgcaaggacccatttgggccaaaattcctcacacggacggcaactttcacccttctccgctgatgggagggtttggaatgaagcacccgcctcctcagatcctcatcaaaaacacacctgtacctgcggatcctccaacggccttcaacaaggccaagctgaactctttcatcacccagtattctactggccaagtcagcgtggagatcgagtgggagctgcagaaggaaaacagcaagcgctggaacccggagatccagtacacttccaactattacaagtctaataatgttgaatttgctgttaatactgaaggtgtatatagtgaaccccgccccattggcaccagatacctgactcgtaatctg

SEQ ID NO: 372 - protein, 736 aa, synthetic construct
  REGION 1..736: note = Adeno Associated Virus Capsid Protein Variant
MAADGYLPDWLEDNLSEGIREWWALKPGAPQPKANQQHQDNARGLVLPGYKYLGPFNGLDKGEPVNAADAAALEHDKAYDQQLKAGDNPYLKYNHADAEFQERLKEDTSFGGNLGRAVFQAKKRLLEPLGLVEEAAKTAPGKKRPVEQSPQEPDSSAGIGKSGAQPAKKRLNFGQTGDTESVPDPQPIGEPPAAPSGVGSLTMASGGGAPVADNNEGADGVGSSSGNWHCDSQWLGDRVITTSTRTWALPTYNNHLYKQISNSTSGGSSNDNAYFGYSTPWGYFDFNRFHCHFSPRDWQRLINNNWGFRPKRLNFKLFNIQVKEVTDNNGTKTIANNLTSTVQVFTDSDYQLPYVLGSAHEGCLPPFPADVFMIPQYGYLTLNDGSQAVGRSSFYCLEYFPSQMLRTGNNFQFSYTFENVPFHSSYAHSQSLDRLMNPLIDQYLYYLSKTINGSGQNQQTLKFSVAGPSNMAVQGRNYIPGPSYRQQRVSTTVTQNNNSEFAWPGASSWALNGRNSLMNPGPAMASHKEGEDRFFPLSGSLIFGKQGTGRDNVDADKVMITNEEEIKTTNPVATESYGQVATNHQSAQAQAQTGWVQNQGILPGMVWQDRDVYLQGPIWAKIPHTDGNFHPSPLMGGFGMKHPPPQILIKNTPVPADPPTAFNKAKLNSFITQYSTGQVSVEIEWELQKENSKRWNPEIQYTSNYYKSNNVEFAVNTEGVYSEPRPIGTRYLTRNL

SEQ ID NO: 373 - DNA, 2208 bp, synthetic construct
  misc_feature 1..2208: note = Adeno Associated Virus Capsid Protein Variant
  source 1..2208: mol_type = other DNA
atggctgccgatggttatcttccagattggctcgaggacaaccttagtgaaggaattcgcgagtggtgggctttgaaacctggagcccctcaacccaaggcaaatcaacaacatcaagacaacgctcgaggtcttgtgcttccgggttacaaataccttggacccggcaacggactcgacaagggggagccggtcaacgcagcagacgcggcggccctcgagcacgacaaggcctacgaccagcagctcaaggccggagacaacccgtacctcaagtacaaccacgccgacgccgagttccaggagcggctcaaagaagatacgtcttttgggggcaacctcgggcgagcagtcttccaggccaaaaagagggtgcttgaacctcttggtctggttgaggaagcggctaagacggctcctggaaagaagaggcctgtagagcagtctcctcaggaaccggactcctccgcgggtattggcaaatcgggtgcacagcccgctaaaaagagactcaatttcggtcagactggcgacacagagtcagtcccagaccctcaaccaatcggagaacctcccgcagccccctcaggtgtgggatctcttacaatggcttcaggtggtggcgcaccagtggcagacaataacgaaggtgccgatggagtgggtagttcctcgggaaattggcattgcgattcccaatggctgggggacagagtcatcaccaccagcacccgaacctgggccctgcccacctacaacaatcacctctacaagcaaatctccaacagcacatctggaggatcttcaaatgacaacgcctacttcggctacagcaccccctgggggtattttgacttcaacagattccactgccacttctcaccacgtgactggcagcgactcatcaacaacaactggggattccggcctaagcgactcaacttcaagctcttcaacattcaggtcaaagaggttacggacaacaatggagtcaagaccatcgccaataaccttaccagcacggtccaggtcttcacggactcagactatcagctcccgtacgtgctcgggtcggctcacgagggctgcctcccgccgttcccagcggacgttttcatgattcctcagtacgggtatctgacgcttaatgacggaagccaggccgtgggtcgttcgtccttttactgcctggaatatttcccgtcgcaaatgctaagaacgggtaacaacttccagttcagctacgagtttgagaacgtacctttccatagcagctacgctcacagccaaagcctggaccgactaatgaatccactcatcgaccaatacttgtactatctctcaaagactattaacggttctggacagaatcaacaaacgctaaaattcagtcaagccggacccagcaacatggctgtccagggaagaaactacatacctggacccagctaccgacaacaacgtgtctcaaccactgtgactcaaaacaacaacagcgaatttgcttggacgggagcttctaagtggcatctcaatggacgtaatagcttgatgaatcctggacctgctatggccagccacaaagaaggagaggaccgtttctttcctttgtctggatctttaatttttggcaaacaaggaactggaagagacaacgtggatgcggacaaagtcatgataaccaacgaagaagaaattaaaactactaacccggtagcaacggagtcctatggacaagtggccacaaaccaccagagtgcccaagcacaggcgcagaccggctgggttcaaaaccaaggaatacttccgggtatggtttggcaggacagagatgtgtacctgcaaggacccatttgggccaaaattcctcacacggacggcaactttcacccttctccgctgatgggagggtttggaatgaagcacccgcctcctcagatcctcatcaaaaacacacctgtacctgcggatcctccaacggccttcaacaaggacaagctgaactctttcatcacccagtattctactggccaagtcagcgtggagatcgagtgggagctgcagaaggaaaacagcaagcgctggaacccggagatccagtacacttccaactattacaagtctaataatgttgaatttgctgttaatactgaaggtgtatatagtgaaccccgccccattggcaccagatacctgactcgtaatctg

SEQ ID NO: 374 - protein, 736 aa, synthetic construct
  REGION 1..736: note = Adeno Associated Virus Capsid Protein Variant
MAADGYLPDWLEDNLSEGIREWWALKPGAPQPKANQQHQDNARGLVLPGYKYLGPGNGLDKGEPVNAADAAALEHDKAYDQQLKAGDNPYLKYNHADAEFQERLKEDTSFGGNLGRAVFQAKKRVLEPLGLVEEAAKTAPGKKRPVEQSPQEPDSSAGIGKSGAQPAKKRLNFGQTGDTESVPDPQPIGEPPAAPSGVGSLTMASGGGAPVADNNEGADGVGSSSGNWHCDSQWLGDRVITTSTRTWALPTYNNHLYKQISNSTSGGSSNDNAYFGYSTPWGYFDFNRFHCHFSPRDWQRLINNNWGFRPKRLNFKLFNIQVKEVTDNNGVKTIANNLTSTVQVFTDSDYQLPYVLGSAHEGCLPPFPADVFMIPQYGYLTLNDGSQAVGRSSFYCLEYFPSQMLRTGNNFQFSYEFENVPFHSSYAHSQSLDRLMNPLIDQYLYYLSKTINGSGQNQQTLKFSQAGPSNMAVQGRNYIPGPSYRQQRVSTTVTQNNNSEFAWTGASKWHLNGRNSLMNPGPAMASHKEGEDRFFPLSGSLIFGKQGTGRDNVDADKVMITNEEEIKTTNPVATESYGQVATNHQSAQAQAQTGWVQNQGILPGMVWQDRDVYLQGPIWAKIPHTDGNFHPSPLMGGFGMKHPPPQILIKNTPVPADPPTAFNKDKLNSFITQYSTGQVSVEIEWELQKENSKRWNPEIQYTSNYYKSNNVEFAVNTEGVYSEPRPIGTRYLTRNL

SEQ ID NO: 375 - DNA, 2208 bp, synthetic construct
  misc_feature 1..2208: note = Adeno Associated Virus Capsid Protein Variant
  source 1..2208: mol_type = other DNA
atggctgccgatggttatcttccagattggctcgaggacaaccttagtgaaggaattcgcgagtggtgggctttgaaacctggagcccctcaacccaaggcaaatcaacaacatcaagacaacgctcgaggtcttgtgcttccgggttacaaataccttggaccctttaacggactcgacaagggggagccggtcaacgcagcagacgcggcggccctcgagcacgacaaggcctacgaccagcagctcaaggccggagacaacccgtacctcaagtacaaccacgccgacgccgagttccaggagcggctcaaagaagatacgtcttttgggggcaacctcgggcgagcagtcttccaggccaaaaagaggcttcttgaacctcttggtctggttgaggaagcggctaagacggctcctggaaagaagaggcctgtagagcagtctcctcaggaaccggactcctccgcgggtattggcaaatcgggtgcacagcccgctaaaaagagactcaatttcggtcagactggcgacacagagtcagtcccagaccctcaaccaatcggagaacctcccgcagccccctcaggtgtgggatctcttacaatggcttcaggtggtggcgcaccagtggcagacaataacgaaggtgccgatggagtgggtagttcctcgggaaattggcattgcgattcccaatggctgggggacagagtcatcaccaccagcacccgaacctgggccctgcccacctacaacaatcacctctacaagcaaatctccaacagcacatctggaggatcttcaaatgacaacgcctacttcggctacagcaccccctgggggtattttgacttcaacagattccactgccacttctcaccacgtgactggcagcgactcatcaacaacaactggggattccggcctaagcgactcaacttcaagctcttcaacattcaggtcaaagaggttacggacaacaatggaacgaagaccatcgccaataaccttaccagcacggtccaggtcttcacggactcagactatcagctcccgtacgtgctcgggtcggctcacgagggctgcctcccgccgttcccagcggacgttttcatgattcctcagtacgggtatctgacgcttaatgatggaagccaggccgtgggtcgttcgtccttttactgcctggaatatttcccgtcgcaaatgctaagaacgggtaacaacttccagttcagctacgagtttgagaacgtacctttccatagcagctacgctcacagccaaagcctggaccgactaatgaatccactcatcgaccaatacttgtactatctctcaaagactattaacggttctggacagaatcaacaaacgctaaaattcagtgtggccggacccagcaacatggctgtccagggaagaaactggatacctggaccctgttaccgacaacaacgtgtctcaaccactgtgactcaaaacaacaacagcgaatttgcttggcctggagcttcttcttgggctctcaatggacgtaatagcttgatgaatcctggacctgctatggccagccacaaagacggagaggaccgtttctttcctttgtctggatctttaatttttggcaaacaaggaactggaagagacaacgtggatgcggacaaagtcatgataaccaacgaagaagaaattaaaactactaacccggtagcaacggagtcctatggacaagtggccacaaaccaccagagtgcccaagcacaggcgcagaccggctgggttaataaccaaggaatacttccgggtatggtttggcaggacagagatgtgtacctgcaaggacccatttgggccaaaattcctcacacggacggcaactttcacccttctccgctgatgggagggtttggaatgaagcacccgcctcctcagatcctcatcaaaaacacacctgtacctgcggatcctccaacggccttcaacaaggacaagctgaactctttcatcacccagtattctactggccaagtcagcgtggagatcgagtgggagctgcagaaggaaaacagcaagcgctggaacccggagatccagtacacttccaactattacaagtctaataatgttgaatttgctgttaatactgaaggtgtatatagtgaaccccgccccattggcaccagatacctgactcgtaatctg

SEQ ID NO: 376 - protein, 736 aa, synthetic construct
  REGION 1..736: note = Adeno Associated Virus Capsid Protein Variant
MAADGYLPDWLEDNLSEGIREWWALKPGAPQPKANQQHQDNARGLVLPGYKYLGPFNGLDKGEPVNAADAAALEHDKAYDQQLKAGDNPYLKYNHADAEFQERLKEDTSFGGNLGRAVFQAKKRLLEPLGLVEEAAKTAPGKKRPVEQSPQEPDSSAGIGKSGAQPAKKRLNFGQTGDTESVPDPQPIGEPPAAPSGVGSLTMASGGGAPVADNNEGADGVGSSSGNWHCDSQWLGDRVITTSTRTWALPTYNNHLYKQISNSTSGGSSNDNAYFGYSTPWGYFDFNRFHCHFSPRDWQRLINNNWGFRPKRLNFKLFNIQVKEVTDNNGTKTIANNLTSTVQVFTDSDYQLPYVLGSAHEGCLPPFPADVFMIPQYGYLTLNDGSQAVGRSSFYCLEYFPSQMLRTGNNFQFSYEFENVPFHSSYAHSQSLDRLMNPLIDQYLYYLSKTINGSGQNQQTLKFSVAGPSNMAVQGRNWIPGPCYRQQRVSTTVTQNNNSEFAWPGASSWALNGRNSLMNPGPAMASHKDGEDRFFPLSGSLIFGKQGTGRDNVDADKVMITNEEEIKTTNPVATESYGQVATNHQSAQAQAQTGWVNNQGILPGMVWQDRDVYLQGPIWAKIPHTDGNFHPSPLMGGFGMKHPPPQILIKNTPVPADPPTAFNKDKLNSFITQYSTGQVSVEIEWELQKENSKRWNPEIQYTSNYYKSNNVEFAVNTEGVYSEPRPIGTRYLTRNL

SEQ ID NO: 377 - DNA, 2208 bp, synthetic construct
  misc_feature 1..2208: note = Adeno Associated Virus Capsid Protein Variant
  source 1..2208: mol_type = other DNA
atggctgccgatggttatcttccagattggctcgaggacaaccttagtgaaggaattcgcgagtggtgggctttgaaacctggagcccctcaacccaaggcaaatcaacaacatcaagacaacgctcgaggtcttgtgcttccgggttacaaataccttggacccggcaacggactcgacaagggggagccggtcaacgcagcagacgcggcggccctcgagcacgacaaggcctacgaccagcagctcaaggccggagacaacccgtacctcaagtacaaccacgccgacgccgagttccaggagcggctcaaagaagatacgtcttttgggggcaacctcgggcgagcagtcttccaggccaaaaagaggctgcttgaacctcttggtctggttgaggaagcggctaagacggctcctggaaagaagaggcctgtagagcagtctcctcaggaaccggactcctccgcgggtattggcaaatcgggtgcacagcccgctaaaaagagactcaatttcggtcagactggcgacacagagtcagtcccagaccctcaaccaatcggagaacctcccgcagccccctcaggtgtgggatctcttacaatggcttcaggtggtggcgcaccagtggcagacaataacgaaggtgccgatggagtgggtagttcctcgggaaattggcattgcgattcccaatggctgggggacagagtcatcaccaccagcacccgaacctgggccctgcccacctacaacaatcacctctacaagcaaatctccaacagcacatctggaggatcttcaaatgacaacgcctacttcggctacagcaccccctgggggtattttgacttcaacagattccactgccacttctcaccacgtgactggcagcgactcatcaacaacaactggggattccggcctaagcgactcaacttcaagctcttcaacattcaggtcaaagaggttacggacaacaatggagtcaagaccatcgccaataaccttaccagcacggtccaggtcttcacggactcagactatcagctcccgtacgtgctcgggtcggctcacgagggctgcctcccgccgttcccagcggacgttttcatgattcctcagtacgggtatctgacgcttaataacggaagccaggccgtgggtcgttcgtccttttactgcctggaatatttcccgtcgcaaatgctaagaacgggtaacaacttccagttcagctacgagtttgagaacgtacctttccatagcagctacgctcacagccaaagcctggaccgactaatgaatccactcatcgaccaatacttgtactatctctcaaagactattaacggttctggacagaatcaacaaacgctaaaattcagtgtggccggacccagcaacatggctgtccagggaagaaactacctgcctggacccagctaccgacaacaacgtgtctcaaccactgtgactcaaaacaacaacagcgaatttgcttggcctggagcttcttcttgggctctcaatggacgtaatagcttgatgaatcctggacctgctatggccagccacaaagaaggagaggaccgtttctttcctttgtctggatctttaatttttggcaaacaaggaactggaagagacaacgtggatgcggacaaagtcatgataaccaacgaagaagaaattaaaactactaacccggtagcaacggagtcctatggacaagtggccacaaaccaccagagtgcccaagcacaggcgcagaccggctgggttcaaaaccaaggaatacttccgggtatggtttggcaggacagagatgtgtacctgcaaggacccatttgggccaaaattcctcacacggacggcaactttcacccttctccgctgatgggagggtttggaatgaagcacccgcctcctcagatcctcatcaaaaacacacctgtacctgcggatcctccaacggccttcaacaaggacaagctgaactctttcatcacccagtattctactggccaagtcagcgtggagatcgagtgggagctgcagaaggaaaacagcaagcgctggaacccggagatccagtacacttccaactattacaagtctaataatgttgaatttgctgttaatactgaaggtgtatatagtgaaccccgccccattggcaccagatacctgactcgtaatctg

SEQ ID NO: 378 - protein, 736 aa, synthetic construct
  REGION 1..736: note = Adeno Associated Virus Capsid Protein Variant
MAADGYLPDWLEDNLSEGIREWWALKPGAPQPKANQQHQDNARGLVLPGYKYLGPGNGLDKGEPVNAADAAALEHDKAYDQQLKAGDNPYLKYNHADAEFQERLKEDTSFGGNLGRAVFQAKKRLLEPLGLVEEAAKTAPGKKRPVEQSPQEPDSSAGIGKSGAQPAKKRLNFGQTGDTESVPDPQPIGEPPAAPSGVGSLTMASGGGAPVADNNEGADGVGSSSGNWHCDSQWLGDRVITTSTRTWALPTYNNHLYKQISNSTSGGSSNDNAYFGYSTPWGYFDFNRFHCHFSPRDWQRLINNNWGFRPKRLNFKLFNIQVKEVTDNNGVKTIANNLTSTVQVFTDSDYQLPYVLGSAHEGCLPPFPADVFMIPQYGYLTLNNGSQAVGRSSFYCLEYFPSQMLRTGNNFQFSYEFENVPFHSSYAHSQSLDRLMNPLIDQYLYYLSKTINGSGQNQQTLKFSVAGPSNMAVQGRNYLPGPSYRQQRVSTTVTQNNNSEFAWPGASSWALNGRNSLMNPGPAMASHKEGEDRFFPLSGSLIFGKQGTGRDNVDADKVMITNEEEIKTTNPVATESYGQVATNHQSAQAQAQTGWVQNQGILPGMVWQDRDVYLQGPIWAKIPHTDGNFHPSPLMGGFGMKHPPPQILIKNTPVPADPPTAFNKDKLNSFITQYSTGQVSVEIEWELQKENSKRWNPEIQYTSNYYKSNNVEFAVNTEGVYSEPRPIGTRYLTRNL

SEQ ID NO: 379 - DNA, 2208 bp, synthetic construct
  misc_feature 1..2208: note = Adeno Associated Virus Capsid Protein Variant
  source 1..2208: mol_type = other DNA
atggctgccgatggttatcttccagattggctcgaggacaaccttagtgaaggaattcgcgagtggtgggctttgaaacctggagcccctcaacccaaggcaaatcaacaacatcaagacaacgctcgaggtcttgtgcttccgggttacaaataccttggacccggcaacggactcgacaagggggagccggtcaacgcagcagacgcggcggccctcgagcacgacaaggcctacgaccagcagctcaaggccggagacaacccgtacctcaagtacaaccacgccgacgccgagttccaggagcggctcaaagaagatacgtcttttgggggcaacctcgggcgagcagtcttccaggccaaaaagaggcttcttgaacctcttggtctggttgaggaagcggctaagacggctcctggaaagaagaggcctgtagagcagtctcctcaggaaccggactcctccgcgggtattggcaaatcgggtgcacagcccgctaaaaagagactcaatttcggtcagactggcgacacagagtcagtcccagaccctcaaccaatcggagaacctcccgcagccccctcaggtgtgggatctcttacaatggcttcaggtggtggcgcaccagtggcagacaataacgaaggtgccgatggagtgggtagttcctcgggaaattggcattgcgattccacgtggctgggggacagagtcatcaccaccagcacccgaacctgggccctgcccacctacaacaatcacctctacaagcaaatctccaacagcacatctggaggatcttcaaatgacaacgcctacttcggctacagcaccccctgggggtattttgacttcaacagattccactgccacttctcaccacgtgactggcagcgactcatcaacaacaactggggattccggcctaagcgactcaacttcaagctcttcaacattcaggtcaaagaggttacggacaacaatggagtcaagaccatcgccaataaccttaccagcacggtccaggtcttcacggactcagactatcagctcccgtacgtgctcgggtcggctcacgagggctgcctcccgccgttcccagcggacgttttcatgattcctcagtacgggtatctgacgcttaatgatggaagccaggccgtgggtcgttcgtccttttactgcctggaatatttcccgtcgcaaatgctaagaacgggtaacaacttccagttcagctacgagtttgagaacgtacctttccatagcagctacgctcacagccaaagcctggaccgactaatgaatccactcatcgaccaatacttgtactatctctcaaagactattaacggttctggacagaatcaacaaacgctaaaattcagtgtggccggacccagcaacatggctgtccagggaagaaactacattcctggacccagctaccgacaacaacgtgtctcaaccactgtgactcaaaacaacaacagcgaatttgcttggcctggagcttcttcttgggctctcaatggacgtaatagcttgatgaatcctggacctgctatggccagccacaaagaaggagaggaccgtttctttcctttgtctggatctttaatttttggcaaacaaggaactggaagagacaacgtggatgcggacaaagtcatgataaccaacgaagaagaaattaaaactactaacccggtagcaacggagtcctatggacaagtggccacaaaccaccagagtgcccaagcacaggcgcagaccggctgggttcaaaaccaaggaatacttccgggtatggtttggcaggacagagatgtgtacctgcaaggacccatttgggccaaaattcctcacacggacggcaactttcacccttctccgctgatgggagggtttggactgaagcacccgcctcctcagatcctcatcaaaaacacacctgtacctgcggatcctccaacggccttcaacaaggacaagctgaactctttcatcacccagtattctactggccaagtcagcgtggagatcgagtgggagctgcagaaggaaaacagcaagcgctggaacccggagatccagtacacttccaactattacaagtctaataatgttgaatttgctgttaatactgaaggtgtatatagtgaaccccgccccattggcaccagatacctgactcgtaatctg

SEQ ID NO: 380 - protein, 736 aa, synthetic construct
  REGION 1..736: note = Adeno Associated Virus Capsid Protein Variant
MAADGYLPDWLEDNLSEGIREWWALKPGAPQPKANQQHQDNARGLVLPGYKYLGPGNGLDKGEPVNAADAAALEHDKAYDQQLKAGDNPYLKYNHADAEFQERLKEDTSFGGNLGRAVFQAKKRLLEPLGLVEEAAKTAPGKKRPVEQSPQEPDSSAGIGKSGAQPAKKRLNFGQTGDTESVPDPQPIGEPPAAPSGVGSLTMASGGGAPVADNNEGADGVGSSSGNWHCDSTWLGDRVITTSTRTWALPTYNNHLYKQISNSTSGGSSNDNAYFGYSTPWGYFDFNRFHCHFSPRDWQRLINNNWGFRPKRLNFKLFNIQVKEVTDNNGVKTIANNLTSTVQVFTDSDYQLPYVLGSAHEGCLPPFPADVFMIPQYGYLTLNDGSQAVGRSSFYCLEYFPSQMLRTGNNFQFSYEFENVPFHSSYAHSQSLDRLMNPLIDQYLYYLSKTINGSGQNQQTLKFSVAGPSNMAVQGRNYIPGPSYRQQRVSTTVTQNNNSEFAWPGASSWALNGRNSLMNPGPAMASHKEGEDRFFPLSGSLIFGKQGTGRDNVDADKVMITNEEEIKTTNPVATESYGQVATNHQSAQAQAQTGWVQNQGILPGMVWQDRDVYLQGPIWAKIPHTDGNFHPSPLMGGFGLKHPPPQILIKNTPVPADPPTAFNKDKLNSFITQYSTGQVSVEIEWELQKENSKRWNPEIQYTSNYYKSNNVEFAVNTEGVYSEPRPIGTRYLTRNL

SEQ ID NO: 381 - DNA, 2208 bp, synthetic construct
  misc_feature 1..2208: note = Adeno Associated Virus Capsid Protein Variant
  source 1..2208: mol_type = other DNA
atggctgccgatggttatcttccagattggctcgaggacaaccttagtgaaggaattcgcgagtggtgggctttgaaacctggagcccctcaacccaaggcaaatcaacaacatcaagacaacgctcgaggtcttgtgcttccgggttacaaataccttggacccggcaacggactcgacaagggggagccggtcaacgcagcagacgcggcggccctcgagcacgacaaggcctacgaccagcagctcaaggccggagacaacccgtacctcaagtacaaccacgccgacgccgagttccaggagcggctcaaagaagatacgtcttttgggggcaacctcgggcgagcagtcttccaggccaaaaagagggtgcttgaacctcttggtctggttgaggaagcggctaagacggctcctggaaagaagaggcctgtagagcagtctcctcaggaaccggactcctccgcgggtattggcaaatcgggtgcacagcccgctaaaaagagactcaatttcggtcagactggcgacacagagtcagtcccagaccctcaaccaatcggagaacctcccgcagccccctcaggtgtgggatctcttacaatggcttcaggtggtggcgcaccagtggcagacaataacgaaggtgccgatggagtgggtagttcctcgggaaattggcattgcgattcccaatggctgggggacagagtcatcaccaccagcacccgaacctgggccctgcccacctacaacaatcacctctacaagcaaatctccaacagcacatctggaggatcttcaaatgacaacgcctacttcggctacagcaccccctgggggtattttgacttcaacagattccactgccacttctcaccacgtgactggcagcgactcatcaacaacaactggggattccggcctaagcgactcaacttcaagctcttcaacattcaggtcaaagaggttacggacaacaatggagtcaagaccatcgccaataaccttaccagcacggtccaggtcttcacggactcagactatcagctcccgtacgtgctcgggtcggctcacgagggctgcctcccgccgttcccagcggacgttttcatgattcctcagtacgggtatctgacgcttaatgatggaagccaggccgtgggtcgttcgtccttttactgcctggaatatttcccgtcgcaaatgctaagaacgggtaacaacttccagttcagctacgagtttgaggatgtacctttccatagcagctacgctcacagccaaagcctggaccgactaatgaatccactcatcgaccaatacttgtactatctctcaaagactattaacggttctggacagaatcaacaaacgctaaaattcagtgtggccggacccagcaacatggctgtccagggaagaaactacattcctggacccagctaccgacaacaacgtgtctcaaccactgtgactcaaaacaacaacagcgaatttgcttggacgggagcttctaagtgggctctcaatggacgtaatagcttgatgaatcctggacctgctatggccagccacaaagaagatgaggaccgtttctttcctttgtctggatctttaatttttggcaaacaaggaactggaagagacaacgtggatgcggacaaagtcatgataaccaacgaagaagaaattaaaactactaacccggtagcaacggagtcctatggacaagtggccacaaaccaccagagtgcccaagctcaggcgcagaccggctgggttcaaaaccaaggaatacttccgggtatggtttggcaggacagagatgtgtacctgcaaggacccatttgggccaaaattcctcacacggacggcaactttcacccttctccgctgatgggagggtttggaatgaagcacccgcctcctcagatcctcatcaaaaacacacctgtacctgcggatcctccaacggccttcaacaaggacaagctgaactctttcatcacccagtattctactggccaagtcagcgtggagatcgagtgggagctgcagaaggaaaacagcaagcgctggaacccggagatccagtacacttccaactattacaagtctaataatgttgaatttgctgttaatactgaaggtgtatatagtgaaccccgccccattggcaccagatacctgactcgtaatctg

SEQ ID NO: 382 - protein, 736 aa, synthetic construct
  REGION 1..736: note = Adeno Associated Virus Capsid Protein Variant
MAADGYLPDWLEDNLSEGIREWWALKPGAPQPKANQQHQDNARGLVLPGYKYLGPGNGLDKGEPVNAADAAALEHDKAYDQQLKAGDNPYLKYNHADAEFQERLKEDTSFGGNLGRAVFQAKKRVLEPLGLVEEAAKTAPGKKRPVEQSPQEPDSSAGIGKSGAQPAKKRLNFGQTGDTESVPDPQPIGEPPAAPSGVGSLTMASGGGAPVADNNEGADGVGSSSGNWHCDSQWLGDRVITTSTRTWALPTYNNHLYKQISNSTSGGSSNDNAYFGYSTPWGYFDFNRFHCHFSPRDWQRLINNNWGFRPKRLNFKLFNIQVKEVTDNNGVKTIANNLTSTVQVFTDSDYQLPYVLGSAHEGCLPPFPADVFMIPQYGYLTLNDGSQAVGRSSFYCLEYFPSQMLRTGNNFQFSYEFEDVPFHSSYAHSQSLDRLMNPLIDQYLYYLSKTINGSGQNQQTLKFSVAGPSNMAVQGRNYIPGPSYRQQRVSTTVTQNNNSEFAWTGASKWALNGRNSLMNPGPAMASHKEDEDRFFPLSGSLIFGKQGTGRDNVDADKVMITNEEEIKTTNPVATESYGQVATNHQSAQAQAQTGWVQNQGILPGMVWQDRDVYLQGPIWAKIPHTDGNFHPSPLMGGFGMKHPPPQILIKNTPVPADPPTAFNKDKLNSFITQYSTGQVSVEIEWELQKENSKRWNPEIQYTSNYYKSNNVEFAVNTEGVYSEPRPIGTRYLTRNL

SEQ ID NO: 383 - DNA, 2208 bp, synthetic construct
  misc_feature 1..2208: note = Adeno Associated Virus Capsid Protein Variant
  source 1..2208: mol_type = other DNA
atggctgccgatggttatcttccagattggctcgaggacaaccttagtgaaggaattcgcgagtggtgggctttgaaacctggagcccctcaacccaaggcaaatcaacaacatcaagacaacgctcgaggtcttgtgcttccgggttacaaataccttggacccggcaacggactcgacaagggggagccggtcaacgcagcagacgcggcggccctcgagcacgacaaggcctacgaccagcagctcaaggccggagacaacccgtacctcaagtacaaccacgccgacgccgagttccaggagcggctcaaagaagatacgtcttttgggggcaacctcgggcgagcagtcttccaggccaaaaagaggctgcttgaacctcttggtctggttgaggaagcggctaagacggctcctggaaagaagaggcctgtagagcagtctcctcaggaaccggactcctccgcgggtattggcaaatcgggtgcacagcccgctaaaaagagactcaatttcggtcagactggcgacacagagtcagtcccagaccctcaaccaatcggagaacctcccgcagccccctcaggtgtgggatctcttacaatggcttcaggtggtggcgcaccagtggcagacaataacgaaggtgccgatggagtgggtagttcctcgggaaattggcattgcgattcccaatggctgggggacagagtcatcaccaccagcacccgaacctgggccctgcccacctacaacaatcacctctacaagcaaatctccaacagcacatctggaggatcttcaaatgacaacgcctacttcggctacagcaccccctgggggtattttgacttcaacagattccactgccacttctcaccacgtgactggcagcgactcatcaacaacaactggggattccggcctaagcgactcaacttcaagctcttcaacattcaggtcaaagaggttacggacaacaatggagtcaagaccatcgccaataaccttaccagcacggtccaggtcttcacggactcagactatcagctcccgtacgtgctcgggtcggctcacgagggctgcctcccgccgttcccagcggacgttttcatgattcctcagtacgggtatctgacgcttaatgatggaagccaggccgtgggtcgttcgtccttttactgcctggaatatttcccgtcgcaaatgctaagaacgggtaacaacttccagttcagctacgagtttgagaacgtacctttccatagcagctacgctcacagccaaagcctggaccgactaatgaatccactcatcgaccaatacttgtactatctctcaaagactattaacggttctggacagaatcaacaaacgctaaaattcagtgtggccggacccagcaacatggctgtccagggaagaaactacatacctggacccagctaccgacaacaacgtgtctcaaccactgtgactcaaaacaacaacagcgaatttgcttggacgggagcttctagttggcatctcaatggacgtaatagcttgatgaatcctggacctgctatggccagccacaaagaaggagaggaccgtttctttcctttgtctggatctttaatttttggcaaacaaggaactggaagagacaacgtggatgcggacaaagtcatgataaccaacgaagaagaaattaaaactactaacccggtagcaacggagtcctatggacaagtggccacaaaccaccagagtgcccaagcacaggcgcagaccggctgggttcaaaaccaaggaatacttccgggtatggtttggcaggacagagatgtgtacctgcaaggacccatttgggccaaaattcctcacacggacggcaactttcacccttctccgctgatgggagggtttggactgaagcacccgcctcctcagatcctcatcaaaaacacacctgtacctgcggatcctccaacggccttcaacaaggacaagctgaactctttcatcacccagtattctactggccaagtcagcgtggagatcgagtgggagctgcagaaggaaaacagcaagcgctggaacccggagatccagtacacttccaactattacaagtctaataatgttgaatttgctgttaatactgaaggtgtatatagtgaaccccgccccattggcaccagatacctgactcgtaatctg

SEQ ID NO: 384 - protein, 736 aa, synthetic construct
  REGION 1..736: note = Adeno Associated Virus Capsid Protein Variant
MAADGYLPDWLEDNLSEGIREWWALKPGAPQPKANQQHQDNARGLVLPGYKYLGPGNGLDKGEPVNAADAAALEHDKAYDQQLKAGDNPYLKYNHADAEFQERLKEDTSFGGNLGRAVFQAKKRLLEPLGLVEEAAKTAPGKKRPVEQSPQEPDSSAGIGKSGAQPAKKRLNFGQTGDTESVPDPQPIGEPPAAPSGVGSLTMASGGGAPVADNNEGADGVGSSSGNWHCDSQWLGDRVITTSTRTWALPTYNNHLYKQISNSTSGGSSNDNAYFGYSTPWGYFDFNRFHCHFSPRDWQRLINNNWGFRPKRLNFKLFNIQVKEVTDNNGVKTIANNLTSTVQVFTDSDYQLPYVLGSAHEGCLPPFPADVFMIPQYGYLTLNDGSQAVGRSSFYCLEYFPSQMLRTGNNFQFSYEFENVPFHSSYAHSQSLDRLMNPLIDQYLYYLSKTINGSGQNQQTLKFSVAGPSNMAVQGRNYIPGPSYRQQRVSTTVTQNNNSEFAWTGASSWHLNGRNSLMNPGPAMASHKEGEDRFFPLSGSLIFGKQGTGRDNVDADKVMITNEEEIKTTNPVATESYGQVATNHQSAQAQAQTGWVQNQGILPGMVWQDRDVYLQGPIWAKIPHTDGNFHPSPLMGGFGLKHPPPQILIKNTPVPADPPTAFNKDKLNSFITQYSTGQVSVEIEWELQKENSKRWNPEIQYTSNYYKSNNVEFAVNTEGVYSEPRPIGTRYLTRNL

SEQ ID NO: 385 - DNA, 2208 bp, synthetic construct
  misc_feature 1..2208: note = Adeno Associated Virus Capsid Protein Variant
  source 1..2208: mol_type = other DNA
atggctgccgatggttatcttccagattggctcgaggacaaccttagtgaaggaattcgcgagtggtgggctttgaaacctggagcccctcaacccaaggcaaatcaacaacatcaagacaacgctcgaggtcttgtgcttccgggttacaaataccttggacccggcaacggactcgacaagggggagccggtcaacgcagcagacgcggcggccctcgagcacgacaaggcctacgaccagcagctcaaggccggagacaacccgtacctcaagtacaaccacgccgacgccgagttccaggagcggctcaaagaagatacgtcttttgggggcaacctcgggcgagcagtcttccaggccaaaaagaggcttcttgaacctcttggtctggttgaggaagcggctaagacggctcctggaaagaagaggcctgtagagcagtctcctcaggaaccggactcctccgcgggtattggcaaatcgggtgcacagcccgctaaaaagagactcaatttcggtcagactggcgacacagagtcagtcccagaccctcaaccaatcggagaacctcccgcagccccctcaggtgtgggatctcttacaatggcttcaggtggtggcgcaccagtggcagacaataacgaaggtgccgatggagtgggtagttcctcgggaaattggcattgcgattcccaatggctgggggacagagtcatcaccaccagcacccgaacctgggccctgcccacctacaacaatcacctctacaagcaaatctccaacagcacatctggaggatcttcaaatgacaacgcctacttcggctacagcaccccctgggggtattttgacttcaacagattccactgccacttctcaccacgtgactggcagcgactcatcaacaacaactggggattccggcctaagcgactcaacttcaagctcttcaacattcaggtcaaagaggttacggacaacaatggagtcaagaccatcgccaataaccttaccagcacggtccaggtcttcacggactcagattatcagctcccgtacgtgctcgggtcggctcacgagggctgcctcccgccgttcccagcggacgttttcatgattcctcagtacgggtatctgacgcttaatgatggaagccaggccgtgggtcgttcgtccttttactgcctggaatatttcccgtcgcaaatgctaagaacgggtaacaacttccagttcagctacgagtttgaggatgtacctttccatagcagctacgctcacagccaaagcctggaccgactaatgaatccactcatcgaccaatacttgtactatctctcaaagactattaacggttctggacagaatcaacaaacgctaaaattcagtgtggccggacccagcaacatggctgtccagggaagaaactacatacctggacccagctaccgacaacaacgtgtctcaaccactgtgactcaaaacaacaacagcgaatttgcttggacgggagcttctaagtgggctctcaatggacgtaatagcttgatgaatcctggacctgctatggccagccacaaagaaggagaggaccgtttctttcctttgtctggatctttaatttttggcaaacaaggaactggaagagacaacgtggatgcggacaaagtcatgataaccaacgaagaagaaattaaaactactaacccggtagcaacggagtcctatggacaagtggccacaaaccaccagagtgcccaagctcaggcgcagaccggctgggttcaaaaccaaggaatacttccgggtatggtttggcaggacagagatgtgtacctgcaaggacccatttgggccaaaattcctcacacggacggcaactttcacccttctccgctgatgggagggtttggaatgaagcacccgcctcctcagatcctcatcaaaaacacacctgtacctgcggatcctccaacggccttcaacaaggacaagctgaactctttcatcacccagtattctactggccaagtcagcgtggagatcgagtgggagctgcagaaggaaaacagcaagcgctggaacccggagatccagtacacttccaactattacaagtctaataatgttgaatttgctgttaatactgaaggtgtatatagtgaaccccgccccattggcaccagatacctgactcgtaatctg

SEQ ID NO: 386 - protein, 736 aa, synthetic construct
  REGION 1..736: note = Adeno Associated Virus Capsid Protein Variant
MAADGYLPDWLEDNLSEGIREWWALKPGAPQPKANQQHQDNARGLVLPGYKYLGPGNGLDKGEPVNAADAAALEHDKAYDQQLKAGDNPYLKYNHADAEFQERLKEDTSFGGNLGRAVFQAKKRLLEPLGLVEEAAKTAPGKKRPVEQSPQEPDSSAGIGKSGAQPAKKRLNFGQTGDTESVPDPQPIGEPPAAPSGVGSLTMASGGGAPVADNNEGADGVGSSSGNWHCDSQWLGDRVITTSTRTWALPTYNNHLYKQISNSTSGGSSNDNAYFGYSTPWGYFDFNRFHCHFSPRDWQRLINNNWGFRPKRLNFKLFNIQVKEVTDNNGVKTIANNLTSTVQVFTDSDYQLPYVLGSAHEGCLPPFPADVFMIPQYGYLTLNDGSQAVGRSSFYCLEYFPSQMLRTGNNFQFSYEFEDVPFHSSYAHSQSLDRLMNPLIDQYLYYLSKTINGSGQNQQTLKFSVAGPSNMAVQGRNYIPGPSYRQQRVSTTVTQNNNSEFAWTGASKWALNGRNSLMNPGPAMASHKEGEDRFFPLSGSLIFGKQGTGRDNVDADKVMITNEEEIKTTNPVATESYGQVATNHQSAQAQAQTGWVQNQGILPGMVWQDRDVYLQGPIWAKIPHTDGNFHPSPLMGGFGMKHPPPQILIKNTPVPADPPTAFNKDKLNSFITQYSTGQVSVEIEWELQKENSKRWNPEIQYTSNYYKSNNVEFAVNTEGVYSEPRPIGTRYLTRNL

SEQ ID NO: 387 - DNA, 2208 bp, synthetic construct
  misc_feature 1..2208: note = Adeno Associated Virus Capsid Protein Variant
  source 1..2208: mol_type = other DNA
atggctgccgatggttatcttccagattggctcgaggacaaccttagtgaaggaattcgcgagtggtgggctttgaaacctggagcccctcaacccaaggcaaatcaacaacatcaagacaacgctcgaggtcttgtgcttccgggttacaaataccttggaccctttaacggactcgacaagggggagccggtcaacgcagcagacgcggcggccctcgagcacgacaaggcctacgaccagcagctcaaggccggagacaacccgtacctcaagtacaaccacgccgacgccgagttccaggagcggctcaaagaagatacgtcttttgggggcaacctcgggcgagcagtcttccaggccaaaaagaggcttcttgaacctcttggtctggttgaggaagcggctaagacggctcctggaaagaagaggcctgtagagcagtctcctcaggaaccggactcctccgcgggtattggcaaatcgggtgcacagcccgctaaaaagagactcaatttcggtcagactggcgacacagagtcagtcccagaccctcaaccaatcggagaacctcccgcagccccctcaggtgtgggatctcttacaatggcttcaggtggtggcgcaccagtggcagacaataacgaaggtgccgatggagtgggtagttcctcgggaaattggcattgcgattcccaatggctgggggacagagtcatcaccaccagcacccgaacctgggccctgcccacctacaacaatcacctctacaagcaaatctccaacagcacatctggaggatcttcaaatgacaacgcctacttcggctacagcaccccctgggggtattttgacttcaacagattccactgccacttctcaccacgtgactggcagcgactcatcaacaacaactggggattccggcctaagcgactcaacttcaagctcttcaacattcaggtcaaagaggttacggacaacaatggaacgaagaccatcgccaataaccttaccagcacggtccaggtcttcacggactcagactatcagctcccgtacgtgctcgggtcggctcaccagggctgcctcccgccgttcccagcggacgttttcatgattcctcagtacgggtatctgacgcttaatgatggaagccaggccgtgggtcgttcgtccttttactgcctggaatatttcccgtcgcaaatgctaagaacgggtaacaacttccagttcagctacgagtttgagaacgtacctttccatagcagctacgctcacagccaaagcctggaccgactaatgaatccactcatcgaccaatacttgtactatctctcaaagactattaacggttctggacagaatcaacaaacgctaaaattcagtgtggccggacccagcaacatggctgtccagggaagaaactacatacctggacccagctaccgacaacaacgtgtctcaaccactgtgactcaaaacaacaacagcgaatttgcttggcctggagcttcttcttgggctctcaatggacgtaatagcttgatgaatcctggacctgctatggccagccacaaagaaggagaggaccgtttctttcctttgtctggatctttaatttttggcaaacaaggaactggaagagacaacgtggatgcggacaaagtcatgataaccaacgaagaagaaattaaaactactaacccggtagcaacggagtcctatggacaagtggccacaaaccaccagagtgcccaagcacaggcgcagaccggctgggttcaaaaccaaggaatacttccgggtatggtttggcaggacagagatgtgtacctgcaaggacccatttgggccaaaattcctcacacggacggcaactttcacccttctccgctgatgggagggtttggaatgaagcacccgcctcctcagatcctcatcaaaaacacacctgtacctgcggatcctccaacggccttcaacaaggacaagctgaactctttcatcacccagtattctactggccaagtcagcgtggagatcgagtgggagctgcagaaggaaaacagcaagcgctggaacccggagatccagtacacttccaactattacaagtctaataatgttgaatttgctgttaatactgaaggtgtatatagtgaaccccgccccattggcaccagatacctgactcgtaatctg

SEQ ID NO: 388 - protein, 736 aa, synthetic construct
  REGION 1..736: note = Adeno Associated Virus Capsid Protein Variant
MAADGYLPDWLEDNLSEGIREWWALKPGAPQPKANQQHQDNARGLVLPGYKYLGPFNGLDKGEPVNAADAAALEHDKAYDQQLKAGDNPYLKYNHADAEFQERLKEDTSFGGNLGRAVFQAKKRLLEPLGLVEEAAKTAPGKKRPVEQSPQEPDSSAGIGKSGAQPAKKRLNFGQTGDTESVPDPQPIGEPPAAPSGVGSLTMASGGGAPVADNNEGADGVGSSSGNWHCDSQWLGDRVITTSTRTWALPTYNNHLYKQISNSTSGGSSNDNAYFGYSTPWGYFDFNRFHCHFSPRDWQRLINNNWGFRPKRLNFKLFNIQVKEVTDNNGTKTIANNLTSTVQVFTDSDYQLPYVLGSAHQGCLPPFPADVFMIPQYGYLTLNDGSQAVGRSSFYCLEYFPSQMLRTGNNFQFSYEFENVPFHSSYAHSQSLDRLMNPLIDQYLYYLSKTINGSGQNQQTLKFSVAGPSNMAVQGRNYIPGPSYRQQRVSTTVTQNNNSEFAWPGASSWALNGRNSLMNPGPAMASHKEGEDRFFPLSGSLIFGKQGTGRDNVDADKVMITNEEEIKTTNPVATESYGQVATNHQSAQAQAQTGWVQNQGILPGMVWQDRDVYLQGPIWAKIPHTDGNFHPSPLMGGFGMKHPPPQILIKNTPVPADPPTAFNKDKLNSFITQYSTGQVSVEIEWELQKENSKRWNPEIQYTSNYYKSNNVEFAVNTEGVYSEPRPIGTRYLTRNL

SEQ ID NO: 389 - DNA, 2208 bp, synthetic construct
  misc_feature 1..2208: note = Adeno Associated Virus Capsid Protein Variant
  source 1..2208: mol_type = other DNA
atggctgccgatggttatcttccagattggctcgaggacaaccttagtgaaggaattcgcgagtggtgggctttgaaacctggagcccctcaacccaaggcaaatcaacaacatcaagacaacgctcgaggtcttgtgcttccgggttacaaataccttggacccggtaacggactcgacaagggggagccggtcaacgcagcagacgcggcggccctcgagcacgacaaggcctacgaccagcagctcaaggccggagacaacccgtacctcaagtacaaccacgccgacgccgagttccaggagcggctcaaagaagatacgtcttttgggggcaacctcgggcgagcagtcttccaggccaaaaagaggcttcttgaacctcttggtctggttgaggaagcggctaagacggctcctggaaagaagaggcctgtagagcagtctcctcaggaaccggactcctccgcgggtattggcaaatcgggtgcacagcccgctaaaaagagactcaatttcggtcagactggcgacacagagtcagtcccagaccctcaaccaatcggagaacctcccgcagccccctcaggtgtgggatctcttacaatggcttcaggtggtggcgcaccagtggcagacaataacgaaggtgccgatggagtgggtagttcctcgggaaattggcattgcgattcccaatggctgggggacagagtcatcaccaccagcacccgaacctgggccctgcccacctacaacaatcacctctacaagcaaatctccaacagcacatctggaggatcttcaaatgacaacgcctacttcggctacagcaccccctgggggtattttgacttcaacagattccactgccacttctcaccacgtgactggcagcgactcatcaacaacaactggggattccggcctaagcgactcaacttcaagctcttcaacattcaggtcaaagaggttacggacaacaatggagtcaagaccatcgccaataaccttaccagcacggtccaggtcttcacggactcagactatcagctcccgtacgtgctcgggtcggctcacgagggctgcctcccgccgttcccagcggacgttttcatgattcctcagtacgggtatctgacgcttaatgatggaagccaggccgtgggtcgttcgtccttttactgcctggaatatttcccgtcgcaaatgctaagaacgggtaacaacttccagttcagctacacctttgagaacgtacctttccatagcagctacgctcacagccaaagcctggaccgactaatgaatccactcatcgaccaatacttgtactatctctcaaagactattaacggttctggacagaatcaacaaacgctaaaattcagtgtggccggacccagcaacatggctgtccagggaagaaactacatacctggacccagctaccgacaacaacgtgtctcaaccactgtgactcaaaacaacaacagcgaatttgcttggcctggagcttcttcttgggctctcaatggacgtaatagcttgatgaatcctggacctgctatggccagccacaaagaaggagaggaccgtttctttcctttgtctggatctttaatttttggcaaacaaggaactggaagagacaacgtggatgcggacaaagtcatgataaccaacgaagaagaaattaaaactactaacccggtagcaacggagtcctatggacaagtggccacaaaccaccagagtgcccaagcacaggcgcagaccggctgggttcaaaaccaaggaatacttccgggtatggtttggcaggacagagatgtgtacctgcaaggacccatttgggccaaaattcctcacacggacggcaactttcacccttctccgctgatgggagggtttggaatgaagcacccgcctcctcagatcctcatcaaaaacacacctgtacctgcggatcctccaacggccttcaacaaggccaagctgaactctttcatcacccagtattctactggccaagtcagcgtggagatcgagtgggagctgcagaaggaaaacagcaagcgctggaacccggagatccagtacacttccaactattacaagtctaataatgttgaatttgctgttaatactgaaggtgtatatagtgaaccccgccccattggcaccagatacctgactcgtaatctg

SEQ ID NO: 390 - protein, 736 aa, synthetic construct
  REGION 1..736: note = Adeno Associated Virus Capsid Protein Variant
MAADGYLPDWLEDNLSEGIREWWALKPGAPQPKANQQHQDNARGLVLPGYKYLGPGNGLDKGEPVNAADAAALEHDKAYDQQLKAGDNPYLKYNHADAEFQERLKEDTSFGGNLGRAVFQAKKRLLEPLGLVEEAAKTAPGKKRPVEQSPQEPDSSAGIGKSGAQPAKKRLNFGQTGDTESVPDPQPIGEPPAAPSGVGSLTMASGGGAPVADNNEGADGVGSSSGNWHCDSQWLGDRVITTSTRTWALPTYNNHLYKQISNSTSGGSSNDNAYFGYSTPWGYFDFNRFHCHFSPRDWQRLINNNWGFRPKRLNFKLFNIQVKEVTDNNGVKTIANNLTSTVQVFTDSDYQLPYVLGSAHEGCLPPFPADVFMIPQYGYLTLNDGSQAVGRSSFYCLEYFPSQMLRTGNNFQFSYTFENVPFHSSYAHSQSLDRLMNPLIDQYLYYLSKTINGSGQNQQTLKFSVAGPSNMAVQGRNYIPGPSYRQQRVSTTVTQNNNSEFAWPGASSWALNGRNSLMNPGPAMASHKEGEDRFFPLSGSLIFGKQGTGRDNVDADKVMITNEEEIKTTNPVATESYGQVATNHQSAQAQAQTGWVQNQGILPGMVWQDRDVYLQGPIWAKIPHTDGNFHPSPLMGGFGMKHPPPQILIKNTPVPADPPTAFNKAKLNSFITQYSTGQVSVEIEWELQKENSKRWNPEIQYTSNYYKSNNVEFAVNTEGVYSEPRPIGTRYLTRNL

SEQ ID NO: 391 - DNA, 2208 bp, synthetic construct
  misc_feature 1..2208: note = Adeno Associated Virus Capsid Protein Variant
  source 1..2208: mol_type = other DNA
atggctgccgatggttatcttccagattggctcgaggacaaccttagtgaaggaattcgcgagtggtgggctttgaaacctggagcccctcaacccaaggcaaatcaacaacatcaagacaacgctcgaggtcttgtgcttccgggttacaaataccttggaccctttaacggactcgacaagggggagccggtcaacgcagcagacgcggcggccctcgagcacgacaaggcctacgaccagcagctcaaggccggagacaacccgtacctcaagtacaaccacgccgacgccgagttccaggagcggctcaaagaagatacgtcttttgggggcaacctcgggcgagcagtcttccaggccaaaaagaggcttcttgaacctcttggtctggttgaggaagcggctaagacggctcctggaaagaagaggcctgtagagcagtctcctcaggaaccggactcctccgcgggtattggcaaatcgggtgcacagcccgctaaaaagagactcaatttcggtcagactggcgacacagagtcagtcccagaccctcaaccaatcggagaacctcccgcagccccctcaggtgtgggatctcttacaatggcttcaggtggtggcgcaccaatggcagacaataacgaaggtgccgatggagtgggtagttcctcgggaaattggcattgcgattcccaatggctgggggacagagtcatcaccaccagcacccgaacctgggccctgcccacctacaacaatcacctctacaagcaaatctccaacagcacatctggaggatcttcaaatgacaacgcctacttcggctacagcaccccctgggggtattttgacttcaacagattccactgccacttctcaccacgtgactggcagcgactcatcaacaacaactggggattccggcctaagcgactcaacttcaagctcttcaacattcaggtcaaagaggttacggacaacaatggagtcaagaccatcgccaataaccttaccagcacggtccaggtcttcacggactcagactatcagctcccgtacgtgctcgggtcggctcaccagggctgcctcccgccgttcccagcggacgttttcatgattcctcagtacgggtatctgacgcttaatgatggaagccaggccgtgggtcgttcgtccttttactgcctggaatatttcccgtcgcaaatgctaagaacgggtaacaacttccagttcagctacacctttgagaacgtacctttccatagcagctacgctcacagccaaagcctggaccgactaatgaatccactcatcgaccaatacttgtactatctctcaaagactattaacggttctggacagaatcaacaaacgctaaaattcagtgtggccggacccagcaacatggctgtccagggaagaaactggatacctggacccagttaccgacaacaacgtgtctcaaccactgtgactcaaaacaacaacagcgaatttgcttggcctggagcttcttcttgggctctcaatggacgtaatagcttgatgaatcctggacctgctatggccagccacaaagaaggagaggaccgtttctttcctttgtctggatctttaatttttggcaaacaaggaactggaagagacaacgtggatgcggacaaagtcatgataaccaacgaagaagaaattaaaactactaacccggtagcaacggagtcctatggacaagtggccacaaacctgcagagtgcccaagcacaggcgcagaccggctgggttcaaaaccaaggaatacttccgggtatggtttggcaggacagagatgtgtacctgcaaggacccatttgggccaaaattcctcacacggacggcaactttcacccttctccgctgatgggagggtttggaatgaagcacccgcctcctcagatcctcatcaaaaacacacctgtacctgcggatcctccaacggccttcaacaaggacaagctgaactctttcatcacccagtattctactggccaagtcagcgtggagatcgagtgggagctgcagaaggaaaacagcaagcgctggaacccggagatccagtacacttccaactattacaagtctaataatgttgaatttgctgttaatactgaaggtgtatatagtgaaccccgccccattggcaccagatacctgactcgtaatctg

SEQ ID NO: 392 - protein, 736 aa, synthetic construct
  REGION 1..736: note = Adeno Associated Virus Capsid Protein Variant
MAADGYLPDWLEDNLSEGIREWWALKPGAPQPKANQQHQDNARGLVLPGYKYLGPFNGLDKGEPVNAADAAALEHDKAYDQQLKAGDNPYLKYNHADAEFQERLKEDTSFGGNLGRAVFQAKKRLLEPLGLVEEAAKTAPGKKRPVEQSPQEPDSSAGIGKSGAQPAKKRLNFGQTGDTESVPDPQPIGEPPAAPSGVGSLTMASGGGAPMADNNEGADGVGSSSGNWHCDSQWLGDRVITTSTRTWALPTYNNHLYKQISNSTSGGSSNDNAYFGYSTPWGYFDFNRFHCHFSPRDWQRLINNNWGFRPKRLNFKLFNIQVKEVTDNNGVKTIANNLTSTVQVFTDSDYQLPYVLGSAHQGCLPPFPADVFMIPQYGYLTLNDGSQAVGRSSFYCLEYFPSQMLRTGNNFQFSYTFENVPFHSSYAHSQSLDRLMNPLIDQYLYYLSKTINGSGQNQQTLKFSVAGPSNMAVQGRNWIPGPSYRQQRVSTTVTQNNNSEFAWPGASSWALNGRNSLMNPGPAMASHKEGEDRFFPLSGSLIFGKQGTGRDNVDADKVMITNEEEIKTTNPVATESYGQVATNLQSAQAQAQTGWVQNQGILPGMVWQDRDVYLQGPIWAKIPHTDGNFHPSPLMGGFGMKHPPPQILIKNTPVPADPPTAFNKDKLNSFITQYSTGQVSVEIEWELQKENSKRWNPEIQYTSNYYKSNNVEFAVNTEGVYSEPRPIGTRYLTRNL

SEQ ID NO: 393 - DNA, 2208 bp, synthetic construct
  misc_feature 1..2208: note = Adeno Associated Virus Capsid Protein Variant
  source 1..2208: mol_type = other DNA
atggctgccgatggttatcttccagattggctcgaggacaaccttagtgaaggaattcgcgagtggtgggctttgaaacctggagcccctcaacccaaggcaaatcaacaacatcaagacaacgctcgaggtcttgtgcttccgggttacaaataccttggaccctttaacggactcgacaagggggagccggtcaacgcagcagacgcggcggccctcgagcacgacaaggcctacgaccagcagctcaaggccggagacaacccgtacctcaagtacaaccacgccgacgccgagttccaggagcggctcaaagaagatacgtcttttgggggcaacctcgggcgagcagtcttccaggccaaaaagaggcttcttgaacctcttggtctggttgaggaagcggctaagacggctcctggaaagaagaggcctgtagagcagtctcctcaggaaccggactcctccgcgggtattggcaaatcgggtgcacagcccgctaaaaagagactcaatttcggtcagactggcgacacagagtcagtcccagaccctcaaccaatcggagaacctcccgcagccccctcaggtgtgggatctcttacaatggcttcaggtggtggcgcaccagtggcagacaataacgaaggtgccgatggagtgggtagttcctcgggaaattggcattgcgattcccaatggctgggggacagagtcatcaccaccagcacccgaacctgggccctgcccacctacaacaatcacctctacaagcaaatctccaacagcacatctggaggatcttcaaatgacaacgcctacttcggctacagcaccccctgggggtattttgacttcaacagattccactgccacttctcaccacgtgactggcagcgactcatcaacaacaactggggattccggcctaagcgactcaacttcaagctcttcaacattcaggtcaaagaggttacggacaacaatggagtcaagaccatcgccaataaccttaccagcacggtccaggtcttcacggactcagactatcagctcccgtacgtgctcgggtcggctcacgagggctgcctcccgccgttcccagcggacgttttcatgattcctcagtacgggtatctgacgcttaatgatggaagccaggccgtgggtcgttcgtccttttactgcctggaatatttcccgtcgcaaatgctaagaacgggtaacaacttccagttcagctacgagtttgagaacgtacctttccatagcagctacgctcacagccaaagcctggaccgactaatgaatccactcatcgaccaatacttgtactatctctcaaagactattaacggttctggacagaatcaacaaacgctaaaattcagtgtggccggacccagcaacatggctgtccagggaagaaactacatacctggacccagttaccgacaacaacgtgtctcaaccactgtgactcaaaacaacaacagcgaatttgcttggcctggagcttcttcttgggctctcaatggacgtaatagcttgatgaatcctggacctgctatggccagccacaaagaaggagaggaccgtttctttcctttgtctggatctttaatttttggcaaacaaggaactggaagagacaacgtggatgcggacaaagtcatgataaccaacgaagaagaaattaaaactactaacccggtagcaacggagtcctatggacaagtggccacaaaccaccagagtgcccaagcacaggcgcagaccggctgggttcaaaaccaaggaatacttccgggtatggtttggcaggacagagatgtgtacctgcaaggacccatttgggccaaaattcctcacacggacggcaactttcacccttctccgctgatgggagggtttggaatgaagcacccgcctcctcagatcctcatcaaaaacacacctgtacctgcggatcctccaacggccttcaacaaggacaagctgaactctttcatcacccagtattctactggccaagtcagcgtggagatcgagtgggagctgcagaaggaaaacagcaagcgctggaacccggagatccagtacacttccaactattacaagtctaataatgttgaatttgctgttaatactgaaggtgtatatagtgaaccccgccccattggcaccagatacctgactcgtaatctg

SEQ ID NO: 394 - protein, 736 aa, synthetic construct
  REGION 1..736: note = Adeno Associated Virus Capsid Protein Variant
MAADGYLPDWLEDNLSEGIREWWALKPGAPQPKANQQHQDNARGLVLPGYKYLGPFNGLDKGEPVNAADAAALEHDKAYDQQLKAGDNPYLKYNHADAEFQERLKEDTSFGGNLGRAVFQAKKRLLEPLGLVEEAAKTAPGKKRPVEQSPQEPDSSAGIGKSGAQPAKKRLNFGQTGDTESVPDPQPIGEPPAAPSGVGSLTMASGGGAPVADNNEGADGVGSSSGNWHCDSQWLGDRVITTSTRTWALPTYNNHLYKQISNSTSGGSSNDNAYFGYSTPWGYFDFNRFHCHFSPRDWQRLINNNWGFRPKRLNFKLFNIQVKEVTDNNGVKTIANNLTSTVQVFTDSDYQLPYVLGSAHEGCLPPFPADVFMIPQYGYLTLNDGSQAVGRSSFYCLEYFPSQMLRTGNNFQFSYEFENVPFHSSYAHSQSLDRLMNPLIDQYLYYLSKTINGSGQNQQTLKFSVAGPSNMAVQGRNYIPGPSYRQQRVSTTVTQNNNSEFAWPGASSWALNGRNSLMNPGPAMASHKEGEDRFFPLSGSLIFGKQGTGRDNVDADKVMITNEEEIKTTNPVATESYGQVATNHQSAQAQAQTGWVQNQGILPGMVWQDRDVYLQGPIWAKIPHTDGNFHPSPLMGGFGMKHPPPQILIKNTPVPADPPTAFNKDKLNSFITQYSTGQVSVEIEWELQKENSKRWNPEIQYTSNYYKSNNVEFAVNTEGVYSEPRPIGTRYLTRNL

SEQ ID NO: 395 - DNA, 2208 bp, synthetic construct
  misc_feature 1..2208: note = Adeno Associated Virus Capsid Protein Variant
  source 1..2208: mol_type = other DNA
atggctgccgatggttatcttccagattggctcgaggacaaccttagtgaaggaattcgcgagtggtgggctttgaaacctggagcccctcaacccaaggcaaatcaacaacatcaagacaacgctcgaggtcttgtgcttccgggttacaaataccttggacccggcaacggactcgacaagggggagccggtcaacgcagcagacgcggcggccctcgagcacgacaaggcctacgaccagcagctcaaggccggagacaacccgtacctcaagtacaaccacgccgacgccgagttccaggagcggctcaaagaagatacgtcttttgggggcaacctcgggcgagcagtcttccaggccaaaaagaggcttcttgaacctcttggtctggttgaggaagcggctaagacggctcctggaaagaagaggcctgtagagcagtctcctcaggaaccggactcctccgcgggtattggcaaatcgggtgcacagcccgctaaaaagagactcaatttcggtcagactggcgacacagagtcagtcccagaccctcaaccaatcggagaacctcccgcagccccctcaggtgtgggatctcttacaatggcttcaggtggtggcgcaccagtggcagacaataacgaaggtgccgatggagtgggtagttcctcgggaaattggcattgcgattcccaatggctgggggacagagtcatcaccaccagcacccgaacctgggccctgcccacctacaacaatcacctctacaagcaaatctccaacagcacatctggaggatcttcaaatgacaacgcctacttcggctacagcaccccctgggggtattttgacttcaacagattccactgccacttctcaccacgtgactggcagcgactcatcaacaacaactggggattccggcctaagcgactcaacttcaagctcttcaacattcaggtcaaagaggttacggacaacaatggagtcaagaccatcgccaataaccttaccagcacggtccaggtcttcacggactcagactatcagctcccgtacgtgctcgggtcggctcaccagggctgcctcccgccgttcccagcggacgttttcatgattcctcagtacgggtatctgacgcttaatgatggaagccaggccgtgggtcgttcgtccttttactgcctggaatatttcccgtcgcaaatgctaagaacgggtaacaacttccagttcagctacgagtttgagaacgtacctttccatagcagctacgctcacagccaaagcctggaccgactaatgaatccactcatcgaccaatacttgtactatctctcaaagactattaacggttctggacagaatcaacaaacgctaaaattcagtgtggccggacccagcaacatggctgtccagggaagaaactacatacctggaccctgttaccgacaacaacgtgtctcaaccactgtgactcaaaacaacaacagcgaatttgcttggcctggagcttcttcttgggctctcaatggacgtaatagcttgatgaatcctggacctgctatggccagccacaaagaaggagaggaccgtttctttcctttgtctggatctttaatttttggcaaacaaggaactggaagagacaacgtggatgcggacaaagtcatgataaccaacgaagaagaaattaaaactactaacccggtagcaacggagtcctatggacaagtggccacaaaccaccagagtgcccaagcacaggcgcagaccggctgggttcaaaaccaaggaatacttccgggtatggtttggcaggacagagatgtgtacctgcaaggacccatttgggccaaaattcctcacacggacggcaactttcacccttctccgctgatgggagggtttggaatgaagcacccgcctcctcagatcctcatcaaaaacacacctgtacctgcggatcctccaacggccttcaacaaggacaagctgaactctttcatcacccagtattctactggccaagtcagcgtggagatcgagtgggagctgcagaaggaaaacagcaagcgctggaacccggagatccagtacacttccaactattacaagtctaataatgttgagtttgctgttaatactgaaggtgtatatagtgaaccccgccccattggcaccagatacctgactcgtaatctg

SEQ ID NO: 396 - protein, 736 aa, synthetic construct
  REGION 1..736: note = Adeno Associated Virus Capsid Protein Variant
MAADGYLPDWLEDNLSEGIREWWALKPGAPQPKANQQHQDNARGLVLPGYKYLGPGNGLDKGEPVNAADAAALEHDKAYDQQLKAGDNPYLKYNHADAEFQERLKEDTSFGGNLGRAVFQAKKRLLEPLGLVEEAAKTAPGKKRPVEQSPQEPDSSAGIGKSGAQPAKKRLNFGQTGDTESVPDPQPIGEPPAAPSGVGSLTMASGGGAPVADNNEGADGVGSSSGNWHCDSQWLGDRVITTSTRTWALPTYNNHLYKQISNSTSGGSSNDNAYFGYSTPWGYFDFNRFHCHFSPRDWQRLINNNWGFRPKRLNFKLFNIQVKEVTDNNGVKTIANNLTSTVQVFTDSDYQLPYVLGSAHQGCLPPFPADVFMIPQYGYLTLNDGSQAVGRSSFYCLEYFPSQMLRTGNNFQFSYEFENVPFHSSYAHSQSLDRLMNPLIDQYLYYLSKTINGSGQNQQTLKFSVAGPSNMAVQGRNYIPGPCYRQQRVSTTVTQNNNSEFAWPGASSWALNGRNSLMNPGPAMASHKEGEDRFFPLSGSLIFGKQGTGRDNVDADKVMITNEEEIKTTNPVATESYGQVATNHQSAQAQAQTGWVQNQGILPGMVWQDRDVYLQGPIWAKIPHTDGNFHPSPLMGGFGMKHPPPQILIKNTPVPADPPTAFNKDKLNSFITQYSTGQVSVEIEWELQKENSKRWNPEIQYTSNYYKSNNVEFAVNTEGVYSEPRPIGTRYLTRNL

SEQ ID NO: 397 - DNA, 2208 bp, synthetic construct
  misc_feature 1..2208: note = Adeno Associated Virus Capsid Protein Variant
  source 1..2208: mol_type = other DNA
atggctgccgatggttatcttccagattggctcgaggacaaccttagtgaaggaattcgcgagtggtgggctttgaaacctggagcccctcaacccaaggcaaatcaacaacatcaagacaacgctcgaggtcttgtgcttccgggttacaaataccttggaccctttaacggactcgacaagggggagccggtcaacgcagcagacgcggcggccctcgagcacgacaaggcctacgaccagcagctcaaggccggagacaacccgtacctcaagtacaaccacgccgacgccgagttccaggagcggctcaaagaagatacgtcttttgggggcaacctcgggcgagcagtcttccaggccaaaaagaggcttcttgaacctcttggtctggttgaggaagcggctaagacggctcctggaaagaagaggcctgtagagcagtctcctcaggaaccggactcctccgcgggtattggcaaatcgggtgcacagcccgctaaaaagagactcaatttcggtcagactggcgacacagagtcagtcccagaccctcaaccaatcggagaacctcccgcagccccctcaggtgtgggatctcttacaatggcttcaggtggtggcgcaccagtggcagacaataacgaaggtgccgatggagtgggtagttcctcgggaaattggcattgcgattcccaatggctgggggacagagtcatcaccaccagcacccgaacctgggccctgcccacctacaacaatcacctctacaagcaaatctccaacagcacatctggaggatcttcaaatgacaacgcctacttcggctacagcaccccctgggggtattttgacttcaacagattccactgccacttctcaccacgtgactggcagcgactcatcaacaacaactggggattccggcctaagcgactcaacttcaagctcttcaacattcaggtcaaagaggttacggacaacaatggaacgaagaccatcgccaataaccttaccagcacggtccaggtcttcacggactcagactatcagctcccgtacgtgctcgggtcggctcacgagggctgcctcccgccgttcccagcggacgttttcatgattcctcagtacgggtatctgacgcttaatgatggaagccaggccgtgggtcgttcgtccttttactgcctggaatatttcccgtcgcaaatgctaagaacgggtaacaacttccagttcagctacacctttgagaacgtacctttccatagcagctacgctcacagccaaagcctggaccgactaatgaatccactcatcgaccaatacttgtactatctctcaaagactattaacggttctggacagaatcaacaaacgctaaaattcagtgtggccggacccagcaacatggctgtccagggaagaaactacatacctggacccagctaccgacaacaacgtgtctcaaccactgtgactcaaaacaacaacagcgaatttgcttggcctggagcttcttcttgggctctcaatggacgtaatagcttgatgaatcctggacctgctatggccagccacaaagaaggagaggaccgtttctttcctttgtctggatctttaatttttggcaaacaaggaactggaagagacaacgtggatgcggacaaagtcatgataaccaacgaagaagaaattaaaactactaacccggtagcaacggagtcctatggacaagtggccacaaaccaccagagtgcccaagcacaggcgcagaccggctgggttcaaaaccaaggaatacttccgggtatggtttggcaggacagagatgtgtacctgcaaggacccatttgggccaaaattcctcacacggacggcaactttcacccttctccgctgatgggagggtttggaatgaagcacccgcctcctcagatcctcatcaaaaacacacctgtacctgcggatcctccaacggccttcaacaaggacaagctgaactctttcatcacccagtattctactggccaagtcagcgtggagatcgagtgggagctgcagaaggaaaacagcaagcgctggaacccggagatccagtacacttccaactattacaagtctaataatgttgaatttgctgttaatactgaaggtgtatatagtgaaccccgccccattggcaccagatacctgactcgtaatctg

SEQ ID NO: 398 - protein, 736 aa, synthetic construct
  REGION 1..736: note = Adeno Associated Virus Capsid Protein Variant
MAADGYLPDWLEDNLSEGIREWWALKPGAPQPKANQQHQDNARGLVLPGYKYLGPFNGLDKGEPVNAADAAALEHDKAYDQQLKAGDNPYLKYNHADAEFQERLKEDTSFGGNLGRAVFQAKKRLLEPLGLVEEAAKTAPGKKRPVEQSPQEPDSSAGIGKSGAQPAKKRLNFGQTGDTESVPDPQPIGEPPAAPSGVGSLTMASGGGAPVADNNEGADGVGSSSGNWHCDSQWLGDRVITTSTRTWALPTYNNHLYKQISNSTSGGSSNDNAYFGYSTPWGYFDFNRFHCHFSPRDWQRLINNNWGFRPKRLNFKLFNIQVKEVTDNNGTKTIANNLTSTVQVFTDSDYQLPYVLGSAHEGCLPPFPADVFMIPQYGYLTLNDGSQAVGRSSFYCLEYFPSQMLRTGNNFQFSYTFENVPFHSSYAHSQSLDRLMNPLIDQYLYYLSKTINGSGQNQQTLKFSVAGPSNMAVQGRNYIPGPSYRQQRVSTTVTQNNNSEFAWPGASSWALNGRNSLMNPGPAMASHKEGEDRFFPLSGSLIFGKQGTGRDNVDADKVMITNEEEIKTTNPVATESYGQVATNHQSAQAQAQTGWVQNQGILPGMVWQDRDVYLQGPIWAKIPHTDGNFHPSPLMGGFGMKHPPPQILIKNTPVPADPPTAFNKDKLNSFITQYSTGQVSVEIEWELQKENSKRWNPEIQYTSNYYKSNNVEFAVNTEGVYSEPRPIGTRYLTRNL

SEQ ID NO: 399 - DNA, 2208 bp, synthetic construct
  misc_feature 1..2208: note = Adeno Associated Virus Capsid Protein Variant
  source 1..2208: mol_type = other DNA
atggctgccgatggttatcttccagattggctcgaggacaaccttagtgaaggaattcgcgagtggtgggctttgaaacctggagcccctcaacccaaggcaaatcaacaacatcaagacaacgctcgaggtcttgtgcttccgggttacaaataccttggacccggtaacggactcgacaagggggagccggtcaacgcagcagacgcggcggccctcgagcacgacaaggcctacgaccagcagctcaaggccggagacaacccgtacctcaagtacaaccacgccgacgccgagttccaggagcggctcaaagaagatacgtcttttgggggcaacctcgggcgagcagtcttccaggccaaaaagaggcttcttgaacctcttggtctggttgaggaagcggctaagacggctcctggaaagaagaggcctgtagagcagtctcctcaggaaccggactcctccgcgggtattggcaaatcgggtgcacagcccgctaaaaagagactcaatttcggtgagactggcgacacagagtcagtcccagaccctcaaccaatcggagaacctcccgcagccccctcaggtgtgggatctcttacaatggcttcaggtggtggcgcaccaatggcagacaataacgaaggtgccgatggagtgggtagttcctcgggaaattggcattgcgattcccaatggctgggggacagagtcatcaccaccagcacccgaacctgggccctgcccacctacaacaatcacctctacaagcaaatctccaacagcacatctggaggatcttcaaatgacaacgcctacttcggctacagcaccccctgggggtattttgacttcaacagattccactgccacttctcaccacgtgactggcagcgactcatcaacaacaactggggattccggcctaagcgactcaacttcaagctcttcaacattcaggtcaaagaggttacggacaacaatggagtaaagaccatcgccaataaccttaccagcacggtccaggtcttcacggactcagactatcagctcccgtacgtgctcgggtcggctcacgagggctgcctcccgccgttcccagcggacgttttcatgattcctcagtacgggtatctgacgcttaatgatggaagccaggccgtgggtcgttcgtccttttactgcctggaatatttcccgtcgcaaatgctaagaacgggtaacaacttccagttcagctacgagtttgagaacgtacctttccatagcagctacgctcacagccaaagcctggaccgactaatgaatccactcatcgaccaatacttgtactatctctcaaagactattaacggttctggacagaatcaacaaacgctaaaattcagtgtggccggacccagcaacatggctgtccagggaagaaactacatacctggacccagctaccgacaacaacgtgtctcaaccactgtgactcaaaacaacaacagcgaatttgcttggcctggagctagttcttgggctctcaatggacgtaatagcttgatgaatcctggacctgctatggccagccacaaagaaggagaggaccgtttctttcctttgtctggatctttaatttttggcaaacaaggaactggaagagacaacgtggatgcggacaaagtcatgataaccaacgaagaagaaattaaaactactaacccggtagcaacggagtcctatggacaagtggccacaaaccaccagagtgcccaagcacaggcgcagaccggctgggttcaaaaccaaggaatacttccgggtatggtttggcaggacagagatgtgtacctgcaaggacccatttgggccaaaattcctcacacggacggcaactttcacccttctccgctgatgggagggtttggaatgaagcacccgcctcctcagatcctcatcaaaaacacacctgtacctgcggatcctccaacggccttcaacaaggacaagctgaactctttcatcacccagtattctactggccaagtcagcgtggagatcgagtgggagctgcagaaggaaaacagcaagcgctggaacccggagatccagtacacttccaactattacaagtctaataatgttgaatttgctgttaatactgaaggtgtatatagtgaaccccgccccattggcaccagatacctgactcgtaatctg

SEQ ID NO: 400 - protein, 736 aa, synthetic construct
  REGION 1..736: note = Adeno Associated Virus Capsid Protein Variant
MAADGYLPDWLEDNLSEGIREWWALKPGAPQPKANQQHQDNARGLVLPGYKYLGPGNGLDKGEPVNAADAAALEHDKAYDQQLKAGDNPYLKYNHADAEFQERLKEDTSFGGNLGRAVFQAKKRLLEPLGLVEEAAKTAPGKKRPVEQSPQEPDSSAGIGKSGAQPAKKRLNFGETGDTESVPDPQPIGEPPAAPSGVGSLTMASGGGAPMADNNEGADGVGSSSGNWHCDSQWLGDRVITTSTRTWALPTYNNHLYKQISNSTSGGSSNDNAYFGYSTPWGYFDFNRFHCHFSPRDWQRLINNNWGFRPKRLNFKLFNIQVKEVTDNNGVKTIANNLTSTVQVFTDSDYQLPYVLGSAHEGCLPPFPADVFMIPQYGYLTLNDGSQAVGRSSFYCLEYFPSQMLRTGNNFQFSYEFENVPFHSSYAHSQSLDRLMNPLIDQYLYYLSKTINGSGQNQQTLKFSVAGPSNMAVQGRNYIPGPSYRQQRVSTTVTQNNNSEFAWPGASSWALNGRNSLMNPGPAMASHKEGEDRFFPLSGSLIFGKQGTGRDNVDADKVMITNEEEIKTTNPVATESYGQVATNHQSAQAQAQTGWVQNQGILPGMVWQDRDVYLQGPIWAKIPHTDGNFHPSPLMGGFGMKHPPPQILIKNTPVPADPPTAFNKDKLNSFITQYSTGQVSVEIEWELQKENSKRWNPEIQYTSNYYKSNNVEFAVNTEGVYSEPRPIGTRYLTRNL

SEQ ID NO: 401 - DNA, 2208 bp, synthetic construct
  misc_feature 1..2208: note = Adeno Associated Virus Capsid Protein Variant
  source 1..2208: mol_type = other DNA
atggctgccgatggttatcttccagattggctcgaggacaaccttagtgaaggaattcgcgagtggtgggctttgaaacctggagcccctcaacccaaggcaaatcaacaacatcaagacaacgctcgaggtcttgtgcttccgggttacaaataccttggaccctttaacggactcgacaagggggagccggtcaacgcagcagacgcggcggccctcgagcacgacaaggcctacgaccagcagctcaaggccggagacaacccgtacctcaagtacaaccacgccgacgccgagttccaggagcggctcaaagaagatacgtcttttgggggcaacctcgggcgagcagtcttccaggccaaaaagaggcttcttgaacctcttggtctggttgaggaagcggctaagacggctcctggaaagaagaggcctgtagagcagtctcctcaggaaccggactcctccgcgggtattggcaaatcgggtgcacagcccgctaaaaagagactcaatttcggtcagactggcgacacagagtcagtcccagaccctcaaccaatcggagaacctcccgcagccccctcaggtgtgggatctcttacaatggcttcaggtggtggcgcaccaatggcagacaataacgaaggtgccgatggagtgggtagttcctcgggaaattggcattgcgattcccaatggctgggggacagagtcatcaccaccagcacccgaacctgggccctgcccacctacaacaatcacctctacaagcaaatctccaacagcacatctggaggatcttcaaatgacaacgcctacttcggctacagcaccccctgggggtattttgacttcaacagattccactgccacttctcaccacgtgactggcagcgactcatcaacaacaactggggattccggcctaagcgactcaacttcaagctcttcaacattcaggtcaaagaggttacggacaacaatggagtcaagaccatcgccaataaccttaccagcacggtccaggtcttcacggactcagactatcagctcccgtacgtgctcgggtcggctcacgagggctgcctcccgccgttcccagcggacgttttcatgattcctcagtacgggtatctgacgcttaatgatggaagccaggccgtgggtcgttcgtccttttactgcctggaatatttcccgtcgcaaatgctaagaacgggtaacaacttccagttcagctacgagtttgagaacgtacctttccatagcagctacgctcacagccaaagcctggaccgactaatgaatccactcatcgaccaatacttgtactatctctcaaagactattaacggttctggacagaatcaacaaacgctaaaattcagtgtggccggacccagcaacatggctgtccagggaagaaactggatacctggaccctgttaccgacaacaacgtgtctcaaccactgtgactcaaaacaacaacagcgaatttgcttggcctggagcttcttcttgggctctcaatggacgtaatagcttgatgaatcctggacctgctatggccagccacaaagaaggagaggaccgtttctttcctttgtctggatctttaatttttggcaaacaaggaactggaagagacaacgtggatgcggacaaagtcatgataaccaacgaagaagaaattaaaactactaacccggtagcaacggagtcctatggacaagtggccacaaaccaccagagtgcccaagcacaggcgcagaccggctgggttcaaaaccaaggaatacttccgggtatggtttggcaggacagagatgtgtacctgcaaggacccatttgggccaaaattcctcacacggacggcaactttcacccttctccgctgatgggagggtttggaatgaagcacccgcctcctcagatcctcatcaaaaacacacctgtacctgcggatcctccaacggccttcaacaaggacaagctgaactctttcatcacccagtattctactggccaagtcagcgtggagatcgagtgggagctgcagaaggaaaacagcaagcgctggaacccggagatccagtacacttccaactattacaagtctaataatgttgactttgctgttaatactgaaggtgtatatagtgaaccccgccccattggcaccagatacctgactcgtaatctg

SEQ ID NO: 402 - protein, 736 aa, synthetic construct
  REGION 1..736: note = Adeno Associated Virus Capsid Protein Variant
MAADGYLPDWLEDNLSEGIREWWALKPGAPQPKANQQHQDNARGLVLPGYKYLGPFNGLDKGEPVNAADAAALEHDKAYDQQLKAGDNPYLKYNHADAEFQERLKEDTSFGGNLGRAVFQAKKRLLEPLGLVEEAAKTAPGKKRPVEQSPQEPDSSAGIGKSGAQPAKKRLNFGQTGDTESVPDPQPIGEPPAAPSGVGSLTMASGGGAPMADNNEGADGVGSSSGNWHCDSQWLGDRVITTSTRTWALPTYNNHLYKQISNSTSGGSSNDNAYFGYSTPWGYFDFNRFHCHFSPRDWQRLINNNWGFRPKRLNFKLFNIQVKEVTDNNGVKTIANNLTSTVQVFTDSDYQLPYVLGSAHEGCLPPFPADVFMIPQYGYLTLNDGSQAVGRSSFYCLEYFPSQMLRTGNNFQFSYEFENVPFHSSYAHSQSLDRLMNPLIDQYLYYLSKTINGSGQNQQTLKFSVAGPSNMAVQGRNWIPGPCYRQQRVSTTVTQNNNSEFAWPGASSWALNGRNSLMNPGPAMASHKEGEDRFFPLSGSLIFGKQGTGRDNVDADKVMITNEEEIKTTNPVATESYGQVATNHQSAQAQAQTGWVQNQGILPGMVWQDRDVYLQGPIWAKIPHTDGNFHPSPLMGGFGMKHPPPQILIKNTPVPADPPTAFNKDKLNSFITQYSTGQVSVEIEWELQKENSKRWNPEIQYTSNYYKSNNVDFAVNTEGVYSEPRPIGTRYLTRNL

SEQ ID NO: 403 - DNA, 2208 bp, synthetic construct
  misc_feature 1..2208: note = Adeno Associated Virus Capsid Protein Variant
  source 1..2208: mol_type = other DNA
atggctgccgatggttatcttccagattggctcgaggacaaccttagtgaaggaattcgcgagtggtgggctttgaaacctggagcccctcaacccaaggcaaatcaacaacatcaagacaacgctcgaggtcttgtgcttccgggttacaaataccttggacccggcaacggactcgacaagggggagccggtcaacgcagcagacgcggcggccctcgagcacgacaaggcctacgaccagcagctcaaggccggagacaacccgtacctcaagtacaaccacgccgacgccgagttccaggagcggctcaaagaagatacgtcttttgggggcaacctcgggcgagcagtcttccaggccaaaaagaggcttcttgaacctcttggtctggttgaggaagcggctaagacggctcctggaaagaagaggcctgtagagcagtctcctcaggaaccggactcctccgcgggtattggcaaatcgggtgcacagcccgctaaaaagagactcaatttcggtcagactggcgacacagagtcagtcccagaccctcaaccaatcggagaacctcccgcagccccctcaggtgtgggatctcttacaatggcttcaggtggtggcgcaccagtggcagacaataacgaaggtgccgatggagtgggtagttcctcgggaaattggcattgcgattcccaatggctgggggacagagtcatcaccaccagcacccgaacctgggccctgcccacctacaacaatcacctctacaagcaaatctccaacagcacatctggaggatcttcaaatgacaacgcctacttcggctacagcaccccctgggggtattttgacttcaacagattccactgccacttctcaccacgtgactggcagcgactcatcaacaacaactggggattccggcctaagcgactcaacttcaagctcttcaacattcaggtcaaagaggttacggacaacaatggagtcaagaccatcgccaataaccttaccagcacggtccaggtcttcacggactcagactatcagctcccgtacgtgctcgggtcggctcacgagggctgcctcccgccgttcccagcggacgttttcatgattcctcagtacgggtatctgacgcttaatgatggaagccaggccgtgggtcgttcgtccttttactgcctggaatatttcccgtcgcaaatgctaagaacgggtaacaacttccagttcagctacgagtttgagaacgtacctttccatagcagctacgctcacagccaaagcctggaccgactaatgaatccactcatcgaccaatacttgtactatctctcacgcactattaacggttctggacagaatcaacaaacgctaaaattcagtgtggccggacccagcaacatggctgtccagggaagaaactacatacctggacccagctaccgacaacaacgtgtctcaaccactgtgactcaaaacaacaacagcgaatttgcttggcctggagcttcttcttgggctctcaatggacgtaatagcttgatgaatcctggacctgctatggccagccacaaagaaggagaggaccgtttctttcctttgtctggatctttaatttttggcaaacaaggaactggaagagacaacgtggatgcggacaaagtcatgataaccaacgaagaagaaattaaaactactaacccggtagcaacggagtcctatggacaagtggccacaaacctgcagagtgcccaagcacaggcgcagaccggctgggttcaaaaccaaggaatacttccgggtatggtttggcaggacagagatgtgtacctgcaaggacccatttgggccaaaattcctcacacggacggcaactttcacccttctccgctgatgggagggtttggaatgaagcacccgcctcctcagatcctcatcaaaaacacacctgtacctgcggatcctccaacggccttcaacaaggacaagctgaactctttcatcacccagtattctactggccaagtcagcgtggagatcgagtgggagctgcagaaggaaaacagcaagcgctggaacccggagatccagtacacttccaactattacaagtctaataatgttgaatttgctgttaatactgaaggtgtatatagtgaaccccgccccattggcaccagatacctgactcgtaatctg

SEQ ID NO: 404 - protein, 736 aa, synthetic construct
  REGION 1..736: note = Adeno Associated Virus Capsid Protein Variant
MAADGYLPDWLEDNLSEGIREWWALKPGAPQPKANQQHQDNARGLVLPGYKYLGPGNGLDKGEPVNAADAAALEHDKAYDQQLKAGDNPYLKYNHADAEFQERLKEDTSFGGNLGRAVFQAKKRLLEPLGLVEEAAKTAPGKKRPVEQSPQEPDSSAGIGKSGAQPAKKRLNFGQTGDTESVPDPQPIGEPPAAPSGVGSLTMASGGGAPVADNNEGADGVGSSSGNWHCDSQWLGDRVITTSTRTWALPTYNNHLYKQISNSTSGGSSNDNAYFGYSTPWGYFDFNRFHCHFSPRDWQRLINNNWGFRPKRLNFKLFNIQVKEVTDNNGVKTIANNLTSTVQVFTDSDYQLPYVLGSAHEGCLPPFPADVFMIPQYGYLTLNDGSQAVGRSSFYCLEYFPSQMLRTGNNFQFSYEFENVPFHSSYAHSQSLDRLMNPLIDQYLYYLSRTINGSGQNQQTLKFSVAGPSNMAVQGRNYIPGPSYRQQRVSTTVTQNNNSEFAWPGASSWALNGRNSLMNPGPAMASHKEGEDRFFPLSGSLIFGKQGTGRDNVDADKVMITNEEEIKTTNPVATESYGQVATNLQSAQAQAQTGWVQNQGILPGMVWQDRDVYLQGPIWAKIPHTDGNFHPSPLMGGFGMKHPPPQILIKNTPVPADPPTAFNKDKLNSFITQYSTGQVSVEIEWELQKENSKRWNPEIQYTSNYYKSNNVEFAVNTEGVYSEPRPIGTRYLTRNL

SEQ ID NO: 405 - DNA, 2208 bp, synthetic construct
  misc_feature 1..2208: note = Adeno Associated Virus Capsid Protein Variant
  source 1..2208: mol_type = other DNA
atggctgccgatggttatcttccagattggctcgaggacaaccttagtgaaggaattcgcgagtggtgggctttgaaacctggagcccctcaacccaaggcaaatcaacaacatcaagacaacgctcgaggtcttgtgcttccgggttacaaataccttggacccggcaacggactcgacaagggggagccggtcaacgcagcagacgcggcggccctcgagcacgacaaggcctacgaccagcagctcaaggccggagacaacccgtacctcaagtacaaccacgccgacgccgagttccaggagcggctcaaagaagatacgtcttttgggggcaacctcgggcgagcagtcttccaggccaaaaagaggctgcttgaacctcttggtctggttgaggaagcggctaagacggctcctggaaagaagaggcctgtagagcagtctcctcaggaaccggactcctccgcgggtattggcaaatcgggtgcacagcccgctaaaaagagactcaatttcggtcagactggcgacacagagtcagtcccagaccctcaaccaatcggagaacctcccgcagccccctcaggtgtgggatctcttacaatggcttcaggtggtggcgcaccagtggcagacaataacgaaggtgccgatggagtgggtagttcctcgggaaattggcattgcgattcccaatggctgggggacagagtcatcaccaccagcacccgaacctgggccctgcccacctacaacaatcacctctacaagcaaatctccaacagcacatctggaggatcttcaaatgacaacgcctacttcggctacagcaccccctgggggtattttgacttcaacagattccactgccacttctcaccacgtgactggcagcgactcatcaacaacaactggggattccggcctaagcgactcaacttcaagctcttcaacattcaggtcaaagaggttacggacaacaatggagtcaagaccatcgccaataaccttaccagcacggtccaggtcttcacggactcagagtatcagctcccgtacgtgctcgggtcggctcacgagggctgcctcccgccgttcccagcggacgttttcatgattcctcagtacgggtatctgacgcttaatgatggaagccaggccgtgggtcgttcgtccttttactgcctggaatatttcccgtcgcaaatgctaagaacgggtaacaacttccagttcagctacgagtttgagaacgtacctttccatagcagctacgctcacagccaaagcctggaccgactaatgaatccactcatcgaccaatacttgtactatctctcaaagactattaacggttctggacagaatcaacaaacgctaaaattcagtgtcgccggacccagcaacatggctgtccagggaagaaactacatacctggacccagctaccgacaacaacgtgtctcaaccactgtgactcaaaacaacaacagcgaatttgcttggacgggagcttctaagtgggctctcaatggacgtaatagcttgatgaatcctggacctgctatggccagccacaaagaaggagaggaccgtttctttcctttgtctggatctttaatttttggcaaacaaggaactggaagagacaacgtggatgcggacaaagtcatgataaccaacgaagaagaaattaaaactactaacccggtagcaacggagtcctatggacaagtggccacaaaccaccagagtgcccaagcacaggcgcagaccggctgggttcaaaaccaaggaatacttccgggtatggtttggcaggacagagatgtgtacctgcaaggacccatttgggccaaaattcctcacacggacggcaactttcacccttctccgctgatgggagggtttggaatgaagcacccgcctcctcagatcctcatcaaaaacacacctgtacctgcggatcctccaacggccttcaacaaggacaagctgaactctttcatcacccagtattctactggccaagtcagcgtggagatcgagtgggagctgcagaaggaaaacagcaagcgctggaacccggagatccagtacacttccaactattacaagtctaataatgttgaatttgctgttaatactgaaggtgtatatagtgaaccccgccccattggcaccagatacctgactcgtaatctg

SEQ ID NO: 406 - protein, 736 aa, synthetic construct
  REGION 1..736: note = Adeno Associated Virus Capsid Protein Variant
MAADGYLPDWLEDNLSEGIREWWALKPGAPQPKANQQHQDNARGLVLPGYKYLGPGNGLDKGEPVNAADAAALEHDKAYDQQLKAGDNPYLKYNHADAEFQERLKEDTSFGGNLGRAVFQAKKRLLEPLGLVEEAAKTAPGKKRPVEQSPQEPDSSAGIGKSGAQPAKKRLNFGQTGDTESVPDPQPIGEPPAAPSGVGSLTMASGGGAPVADNNEGADGVGSSSGNWHCDSQWLGDRVITTSTRTWALPTYNNHLYKQISNSTSGGSSNDNAYFGYSTPWGYFDFNRFHCHFSPRDWQRLINNNWGFRPKRLNFKLFNIQVKEVTDNNGVKTIANNLTSTVQVFTDSEYQLPYVLGSAHEGCLPPFPADVFMIPQYGYLTLNDGSQAVGRSSFYCLEYFPSQMLRTGNNFQFSYEFENVPFHSSYAHSQSLDRLMNPLIDQYLYYLSKTINGSGQNQQTLKFSVAGPSNMAVQGRNYIPGPSYRQQRVSTTVTQNNNSEFAWTGASKWALNGRNSLMNPGPAMASHKEGEDRFFPLSGSLIFGKQGTGRDNVDADKVMITNEEEIKTTNPVATESYGQVATNHQSAQAQAQTGWVQNQGILPGMVWQDRDVYLQGPIWAKIPHTDGNFHPSPLMGGFGMKHPPPQILIKNTPVPADPPTAFNKDKLNSFITQYSTGQVSVEIEWELQKENSKRWNPEIQYTSNYYKSNNVEFAVNTEGVYSEPRPIGTRYLTRNL

SEQ ID NO: 407 - DNA, 2208 bp, synthetic construct
  misc_feature 1..2208: note = Adeno Associated Virus Capsid Protein Variant
  source 1..2208: mol_type = other DNA
atggctgccgatggttatcttccagattggctcgaggacaaccttagtgaaggaattcgcgagtggtgggctttgaaacctggagcccctcaacccaaggcaaatcaacaacatcaagacaacgctcgaggtcttgtgcttccgggttacaaataccttggacccggcaacggactcgacaagggggagccggtcaacgcagcagacgcggcggccctcgagcacgacaaggcctacgaccagcagctcaaggccggagacaacccgtacctcaagtacaaccacgccgacgccgagttccaggagcggctcaaagaagatacgtcttttgggggcaacctcgggcgagcagtcttccaggccaaaaagaggcttcttgaacctcttggtctggttgaggaagcggctaagacggctcctggaaagaagaggcctgtagagcagtctcctcaggaaccggactcctccgcgggtattggcaaatcgggtgcacagcccgctaaaaagagactcaatttcggtcagactggcgacacagagtcagtcccagaccctcaaccaatcggagaacctcccgcagccccctcaggtgtgggatctcttacaatggcttcaggtggtggcgcaccagtggcagacaataacgaaggtgccgatggagtgggtagttcctcgggaaattggcattgcgattcccaatggctgggggacagagtcatcaccaccagcacccgaacctgggccctgcccacctacaacaatcacctctacaagcaaatctccaacagcacatctggaggatcttcaaatgacaacgcctacttcggctacagcaccccctgggggtattttgacttcaacagattccactgccacttctcaccacgtgactggcagcgactcatcaacaacaactggggattccggcctaagcgactcaacttcaagctcttcaacattcaggtcaaagaggttacggacaacaatggagtcaagaccatcgccaataaccttaccagcacggtccaggtcttcacggactcagactatcagctcccgtacgtgctcgggtcggctcacgagggctgcctcccgccgttcccagcggacgttttcatgattcctcagtacgggtatctgacgcttaataacggaagccaggccgtgggtcgttcgtccttttactgcctggaatatttcccgtcgcaaatgctaagaacgggtaacaacttccagttcagctacgagtttgagaacgtacctttccatagcagctacgctcacagccaaagcctggaccgactaatgaatccactcatcgaccaatacttgtactatctctcaaagactattaacggttctggacagaatcaacaaacgctaaaattcagtgtggccggacccagcaacatggctgtccagggaagaaactacctgcctggacccagctaccgacaacaacgtgtctcaaccactgtgactcaaaacaacaacagcgaatttgcttggacgggagcttctaagtggcatctcaatggacgtaatagcttgatgaatcctggacctgctatggccagccacaaagaaggagaggaccgtttctttcctttgtctggatctttaatttttggcaaacaaggaactggaagagacaacgtggatgcggacaaagtcatgataaccaacgaagaagaaattaaaactactaacccggtagcaacggagtcctatggacaagtggccacaaaccaccagagtgcccaagcacaggcgcagaccggctgggttcaaaaccaaggaatacttccgggtatggtttggcaggacagagatgtgtacctgcaaggacccatttgggccaaaattcctcacacggacggcaactttcacccttctccgctgatgggagggtttggaatgaagcacccgcctcctcagatcctcatcaaaaacacacctgtacctgcggatcctccaacggccttcaacaaggacaagctgaactctttcatcacccagtattctactggccaagtcagcgtggagatcgagtgggagctgcagaaggaaaacagcaagcgctggaacccggagatccagtacacttccaactattacaagtctaataatgttgaatttgctgttaatactgaaggtgtatatagtgaaccccgccccattggcaccagatacctgactcgtaatctg

SEQ ID NO: 408 - protein, 736 aa, synthetic construct
  REGION 1..736: note = Adeno Associated Virus Capsid Protein Variant
MAADGYLPDWLEDNLSEGIREWWALKPGAPQPKANQQHQDNARGLVLPGYKYLGPGNGLDKGEPVNAADAAALEHDKAYDQQLKAGDNPYLKYNHADAEFQERLKEDTSFGGNLGRAVFQAKKRLLEPLGLVEEAAKTAPGKKRPVEQSPQEPDSSAGIGKSGAQPAKKRLNFGQTGDTESVPDPQPIGEPPAAPSGVGSLTMASGGGAPVADNNEGADGVGSSSGNWHCDSQWLGDRVITTSTRTWALPTYNNHLYKQISNSTSGGSSNDNAYFGYSTPWGYFDFNRFHCHFSPRDWQRLINNNWGFRPKRLNFKLFNIQVKEVTDNNGVKTIANNLTSTVQVFTDSDYQLPYVLGSAHEGCLPPFPADVFMIPQYGYLTLNNGSQAVGRSSFYCLEYFPSQMLRTGNNFQFSYEFENVPFHSSYAHSQSLDRLMNPLIDQYLYYLSKTINGSGQNQQTLKFSVAGPSNMAVQGRNYLPGPSYRQQRVSTTVTQNNNSEFAWTGASKWHLNGRNSLMNPGPAMASHKEGEDRFFPLSGSLIFGKQGTGRDNVDADKVMITNEEEIKTTNPVATESYGQVATNHQSAQAQAQTGWVQNQGILPGMVWQDRDVYLQGPIWAKIPHTDGNFHPSPLMGGFGMKHPPPQILIKNTPVPADPPTAFNKDKLNSFITQYSTGQVSVEIEWELQKENSKRWNPEIQYTSNYYKSNNVEFAVNTEGVYSEPRPIGTRYLTRNL

SEQ ID NO: 409 - DNA, 2208 bp, synthetic construct
  misc_feature 1..2208: note = Adeno Associated Virus Capsid Protein Variant
  source 1..2208: mol_type = other DNA
atggctgccgatggttatcttccagattggctcgaggacaaccttagtgaaggaattcgcgagtggtgggctttgaaacctggagcccctcaacccaaggcaaatcaacaacatcaagacaacgctcgaggtcttgtgcttccgggttacaaataccttggacccggcaacggactcgacaagggggagccggtcaacgcagcagacgcggcggccctcgagcacgacaaggcctacgaccagcagctcaaggccggagacaacccgtacctcaagtacaaccacgccgacgccgagttccaggagcggctcaaagaagatacgtcttttgggggcaacctcgggcgagcagtcttccaggccaaaaagagggtgcttgaacctcttggtctggttgaggaagcggctaagacggctcctggaaagaagaggcctgtagagcagtctcctcaggaaccggactcctccgcgggtattggcaaatcgggtgcacagcccgctaaaaagagactcaatttcggtcagactggcgacacagagtcagtcccagaccctcaaccaatcggagaacctcccgcagccccctcaggtgtgggatctcttacaatggcttcaggtggtggcgcaccagtggcagacaataacgaaggtgccgatggagtgggtagttcctcgggaaattggcattgcgattcccaatggctgggggacagagtcatcaccaccagcacccgaacctgggccctgcccacctacaacaatcacctctacaagcaaatctccaacagcacatctggaggatcttcaaatgacaacgcctacttcggctacagcaccccctgggggtattttgacttcaacagattccactgccacttctcaccacgtgactggcagcgactcatcaacaacaactggggattccggcctaagcgactcaacttcaagctcttcaacattcaggtcaaagaggttacggacaacaatggagtcaagaccatcgccaataaccttaccagcacggtccaggtcttcacggactcagactatcagctcccgtacgtgctcgggtcggctcacgagggctgcctcccgccgttcccagcggacgttttcatgattcctcagtacgggtatctgacgcttaatgatggaagccaggccgtgggtcgttcgtccttttactgcctggaatatttcccgtcgcaaatgctaagaacgggtaacaacttccagttcagctacgagtttgagaacgtacctttccatagcagctacgctcacagccaaagcctggaccgactaatgaatccactcatcgaccaatacttgtactatctctcaaagactattaacggttctggacagaatcaacaaacgctaaaattcagtgtggccggacccagcaacatggctgtccagggaagaaactacatacctggacccagctaccgacaacaacgtgtctcaaccactgtgactcaaaacaacaacagcgaatttgcttggccgggagcttctaagtggcatctcaatggacgtaatagcttgatgaatcctggacctgctatggccagccacaaagaaggagaggaccgtttctttcctttgtctggatctttaatttttggcaaacaaggaactggaagagacaacgtggatgcggacaaagtcatgataaccaacgaagaagaaattaaaactactaacccggtagcaacggagtcctatggacaagtggccacaaaccaccagagtgcccaagcacaggcgcagaccggctgggttcaaaaccaaggaatacttccgggtatggtttggcaggacagagatgtgtacctgcaaggacccatttgggccaaaattcctcacacggacggcaactttcacccttctccgctgatgggagggtttggaatgaagcacccgcctcctcagatcctcatcaaaaacacacctgtacctgcggatcctccaacggccttcaacaaggacaagctgaactctttcatcacccagtattctactggccaagtcagcgtggagatcgagtgggagctgcagaaggaaaacagcaagcgctggaacccggagatccagtacacttccaactattacaagtctaataatgttgaatttgctgttaatactgaaggtgtatatagtgaaccccgccccattggcaccagatacctgactcgtaatctg

SEQ ID NO: 410 - protein, 736 aa, synthetic construct
  REGION 1..736: note = Adeno Associated Virus Capsid Protein Variant
MAADGYLPDWLEDNLSEGIREWWALKPGAPQPKANQQHQDNARGLVLPGYKYLGPGNGLDKGEPVNAADAAALEHDKAYDQQLKAGDNPYLKYNHADAEFQERLKEDTSFGGNLGRAVFQAKKRVLEPLGLVEEAAKTAPGKKRPVEQSPQEPDSSAGIGKSGAQPAKKRLNFGQTGDTESVPDPQPIGEPPAAPSGVGSLTMASGGGAPVADNNEGADGVGSSSGNWHCDSQWLGDRVITTSTRTWALPTYNNHLYKQISNSTSGGSSNDNAYFGYSTPWGYFDFNRFHCHFSPRDWQRLINNNWGFRPKRLNFKLFNIQVKEVTDNNGVKTIANNLTSTVQVFTDSDYQLPYVLGSAHEGCLPPFPADVFMIPQYGYLTLNDGSQAVGRSSFYCLEYFPSQMLRTGNNFQFSYEFENVPFHSSYAHSQSLDRLMNPLIDQYLYYLSKTINGSGQNQQTLKFSVAGPSNMAVQGRNYIPGPSYRQQRVSTTVTQNNNSEFAWPGASKWHLNGRNSLMNPGPAMASHKEGEDRFFPLSGSLIFGKQGTGRDNVDADKVMITNEEEIKTTNPVATESYGQVATNHQSAQAQAQTGWVQNQGILPGMVWQDRDVYLQGPIWAKIPHTDGNFHPSPLMGGFGMKHPPPQILIKNTPVPADPPTAFNKDKLNSFITQYSTGQVSVEIEWELQKENSKRWNPEIQYTSNYYKSNNVEFAVNTEGVYSEPRPIGTRYLTRNL

SEQ ID NO: 411 - DNA, 2208 bp, synthetic construct
  misc_feature 1..2208: note = Adeno Associated Virus Capsid Protein Variant
  source 1..2208: mol_type = other DNA
atggctgccgatggttatcttccagattggctcgaggacaaccttagtgaaggaattcgcgagtggtgggctttgaaacctggagcccctcaacccaaggcaaatcaacaacatcaagacaacgctcgaggtcttgtgcttccgggttacaaataccttggacccggcaacggactcgacaagggggagccggtcaacgcagcagacgcggcggccctcgagcacgacaaggcctacgaccagcagctcaaggccggagacaacccgtacctcaagtacaaccacgccgacgccgagttccaggagcggctcaaagaagatacgtcttttgggggcaacctcgggcgagcagtcttccaggccaaaaagaggcttcttgaacctcttggtctggttgaggaagcggctaagacggctcctggaaagaagaggcctgtagagcagtctcctcaggaaccggactcctccgcgggtattggcaaatcgggtgcacagcccgctaaaaagagactcaatttcggtcagactggcgacacagagtcagtcccagaccctcaaccaatcggagaacctcccgcagccccctcaggtgtgggatctcttacaatggcttcaggtggtggcgcaccagtggcagacaataacgaaggtgccgatggagtgggtagttcctcgggaaattggcattgcgattcccaatggctgggggacagagtcatcaccaccagcacccgaacctgggccctgcccacctacaacaatcacctctacaagcaaatctccaacagcacatctggaggatcttcaaatgacaacgcctacttcggctacagcaccccctgggggtattttgacttcaacagattccactgccacttctcaccacgtgactggcagcgactcatcaacaacaactggggattccggcctaagcgactcaacttcaagctcttcaacattcaggtcaaagaggttacggacaacaatggagtcaagaccatcgccaataaccttaccagcacggtccaggtcttcacggactcagactatcagctcccgtacgtgctcgggtcggctcacgagggctgcctcccgccgttcccagcggacgttttcatgattcctcagtacgggtatctgacgcttaatgatggaagccaggccgtgggtcgttcgtccttttactgcctggaatatttcccgtcgcaaatgctaagaacgggtaacaacttccagttcagctacgagtttgagaacgtacctttccatagcagctacgctcacagccaaagcctggaccgactaatgaatccactcatcgaccaatacttgtactatctctcaaagactattaacggttctggacagaatcaacaaacgctaaaattcagtgtggccggacccagcaacatggctgtccagggaagaaactacatacctggacccagctaccgacaacaacgtgtctcaaccactgtgactcaaaacaacaacagcgaatttgcttggcctggagctacttcttacgctctcaatggacgtaatagcttgatgaatcctggacctgctatggccagccacaaagacggagaggaccgtttctttcctttgtctggatctttaatttttggcaaacaaggaactggaagagacaacgtggatgcggacaaagtcatgataaccaacgaagaagaaattaaaactactaacccggtagcaacggagtcctatggacaagtggccacaaaccatcagagtgcccaagcacaggcgcagaccggctgggttcaaaaccaaggaatacttccgggtatggtttggcaggacagagatgtgtacctgcaaggacccatttgggccaaaattcctcacacggacggcaactttcacccttctccgctgatgggagggtttggaatgaagcacccgcctcctcagatcctcatcaaaaacacacctgtacctgcggatcctccaacggccttcaacaaggacaagctgaactctttcatcacccagtattctactggccaagtcagcgtggagatcgagtgggagctgcagaaggaaaacagcaagcgctggaacccggagatccagtacacttccaactattacaagtctaataatgttgaatttgctgttaatactgaaggtgtatatagtgaaccccgccccattggcaccagatacctgactcgtaatctg

SEQ ID NO: 412 - protein, 736 aa, synthetic construct
  REGION 1..736: note = Adeno Associated Virus Capsid Protein Variant
MAADGYLPDWLEDNLSEGIREWWALKPGAPQPKANQQHQDNARGLVLPGYKYLGPGNGLDKGEPVNAADAAALEHDKAYDQQLKAGDNPYLKYNHADAEFQERLKEDTSFGGNLGRAVFQAKKRLLEPLGLVEEAAKTAPGKKRPVEQSPQEPDSSAGIGKSGAQPAKKRLNFGQTGDTESVPDPQPIGEPPAAPSGVGSLTMASGGGAPVADNNEGADGVGSSSGNWHCDSQWLGDRVITTSTRTWALPTYNNHLYKQISNSTSGGSSNDNAYFGYSTPWGYFDFNRFHCHFSPRDWQRLINNNWGFRPKRLNFKLFNIQVKEVTDNNGVKTIANNLTSTVQVFTDSDYQLPYVLGSAHEGCLPPFPADVFMIPQYGYLTLNDGSQAVGRSSFYCLEYFPSQMLRTGNNFQFSYEFENVPFHSSYAHSQSLDRLMNPLIDQYLYYLSKTINGSGQNQQTLKFSVAGPSNMAVQGRNYIPGPSYRQQRVSTTVTQNNNSEFAWPGATSYALNGRNSLMNPGPAMASHKDGEDRFFPLSGSLIFGKQGTGRDNVDADKVMITNEEEIKTTNPVATESYGQVATNHQSAQAQAQTGWVQNQGILPGMVWQDRDVYLQGPIWAKIPHTDGNFHPSPLMGGFGMKHPPPQILIKNTPVPADPPTAFNKDKLNSFITQYSTGQVSVEIEWELQKENSKRWNPEIQYTSNYYKSNNVEFAVNTEGVYSEPRPIGTRYLTRNL

SEQ ID NO: 413 - DNA, 2208 bp, synthetic construct
  misc_feature 1..2208: note = Adeno Associated Virus Capsid Protein Variant
  source 1..2208: mol_type = other DNA
atggctgccgatggttatcttccagattggctcgaggacaaccttagtgaaggaattcgcgagtggtgggctttgaaacctggagcccctcaacccaaggcaaatcaacaacatcaagacaacgctcgaggtcttgtgcttccgggttacaaataccttggacccggtaacggactcgacaagggggagccggtcaacgcagcagacgcggcggccctcgagcacgacaaggcctacgaccagcagctcaaggccggagacaacccgtacctcaagtacaaccacgccgacgccgagttccaggagcggctcaaagaagatacgtcttttgggggcaacctcgggcgagcagtcttccaggccaaaaagaggcttcttgaacctcttggtctggttgaggaagcggctaagacggctcctggaaagaagaggcctgtagagcagtctcctcaggaaccggactcctccgcgggtattggcaaatcgggtgcacagcccgctaaaaagagactcaatttcggtcagactggcgacacagagtcagtcccagaccctcaaccaatcggagaacctcccgcagccccctcaggtgtgggatctcttacaatggcttcaggtggtggcgcaccagtggcagacaataacgaaggtgccgatggagtgggtagttcctcgggaaattggcattgcgattcccaatggctgggggacagagtcatcaccaccagcacccgaacctgggccctgcccacctacaacaatcacctctacaagcaaatctccaacagcacatctggaggatcttcaaatgacaacgcctacttcggctacagcaccccctgggggtattttgacttcaacagattccactgccacttctcaccacgtgactggcagcgactcatcaacaacaactggggattccggcctaagcgactcaacttcaagctcttcaacattcaggtcaaagaggttacggacaacaatggaacgaagaccatcgccaataaccttaccagcacggtccaggtcttcacggactcagactatcagctcccgtacgtgctcgggtcggctcacgagggctgcctcccgccgttcccagcggacgttttcatgattcctcagtacgggtatctgacgcttaatgatggaagccaggccgtgggtcgttcgtccttttactgcctggaatatttcccgtcgcaaatgctaagaacgggtaacaacttccagttcagctacacctttgagaacgtacctttccatagcagctacgctcacagccaaagcctggaccgactaatgaatccactcatcgaccaatacttgtactatctctcaaagactattaacggttctggacagaatcaacaaacgctaaaattcagtgtggccggacccagcaacatggctgtccagggaagaaactacatacctggacccagttaccgacaacaacgtgtctcaaccactgtgactcaaaacaacaacagcgaatttgcttggcctggagcttcttcttgggctctcaatggacgtaatagcttgatgaatcctggacctgctatggccagccacaaagaaggagaggaccgtttctttcctttgtctggatctttaatttttggcaaacaaggaactggaagagacaacgtggatgcggacaaagtcatgataaccaacgaagaagaaattaaaactactaacccggtagcaacggagtcctatggacaagtggccacaaaccaccagagtgcccaagcacaggcgcagaccggctgggttcaaaaccaaggaatacttccgggtatggtttggcaggacagagatgtgtacctgcaaggacccatttgggccaaaattcctcacacggacggcaactttcacccttctccgctgatgggagggtttggaatgaagcacccgcctcctcagatcctcatcaaaaacacacctgtacctgcggatcctccaacggccttcaacaaggacaagctgaactctttcatcacccagtattctactggccaagtcagcgtggagatcgagtgggagctgcagaaggaaaacagcaagcgctggaacccggagatccagtacacttccaactattacaagtctaataatgttgaatttgctgttaatactgaaggtgtatatagtgaaccccgccccattggcaccagatacctgactcgtaatctg

SEQ ID NO: 414 - protein, 736 aa, synthetic construct
  REGION 1..736: note = Adeno Associated Virus Capsid Protein Variant
MAADGYLPDWLEDNLSEGIREWWALKPGAPQPKANQQHQDNARGLVLPGYKYLGPGNGLDKGEPVNAADAAALEHDKAYDQQLKAGDNPYLKYNHADAEFQERLKEDTSFGGNLGRAVFQAKKRLLEPLGLVEEAAKTAPGKKRPVEQSPQEPDSSAGIGKSGAQPAKKRLNFGQTGDTESVPDPQPIGEPPAAPSGVGSLTMASGGGAPVADNNEGADGVGSSSGNWHCDSQWLGDRVITTSTRTWALPTYNNHLYKQISNSTSGGSSNDNAYFGYSTPWGYFDFNRFHCHFSPRDWQRLINNNWGFRPKRLNFKLFNIQVKEVTDNNGTKTIANNLTSTVQVFTDSDYQLPYVLGSAHEGCLPPFPADVFMIPQYGYLTLNDGSQAVGRSSFYCLEYFPSQMLRTGNNFQFSYTFENVPFHSSYAHSQSLDRLMNPLIDQYLYYLSKTINGSGQNQQTLKFSVAGPSNMAVQGRNYIPGPSYRQQRVSTTVTQNNNSEFAWPGASSWALNGRNSLMNPGPAMASHKEGEDRFFPLSGSLIFGKQGTGRDNVDADKVMITNEEEIKTTNPVATESYGQVATNHQSAQAQAQTGWVQNQGILPGMVWQDRDVYLQGPIWAKIPHTDGNFHPSPLMGGFGMKHPPPQILIKNTPVPADPPTAFNKDKLNSFITQYSTGQVSVEIEWELQKENSKRWNPEIQYTSNYYKSNNVEFAVNTEGVYSEPRPIGTRYLTRNL

SEQ ID NO: 415 - DNA, 2208 bp, synthetic construct
  misc_feature 1..2208: note = Adeno Associated Virus Capsid Protein Variant
  source 1..2208: mol_type = other DNA
atggctgccgatggttatcttccagattggctcgaggacaaccttagtgaaggaattcgcgagtggtgggctttgaaacctggagcccctcaacccaaggcaaatcaacaacatcaagacaacgctcgaggtcttgtgcttccgggttacaaataccttggacccggtaacggactcgacaagggggagccggtcaacgcagcagacgcggcggccctcgagcacgacaaggcctacgaccagcagctcaaggccggagacaacccgtacctcaagtacaaccacgccgacgccgagttccaggagcggctcaaagaagatacgtcttttgggggcaacctcgggcgagcagtcttccaggccaaaaagaggcttcttgaacctcttggtctggttgaggaagcggctaagacggctcctggaaagaagaggcctgtagagcagtctcctcaggaaccggactcctccgcgggtattggcaaatcgggtgcacagcccgctaaaaagagactcaatttcggtcagactggcgacacagagtcagtcccagaccctcaaccaatcggagaacctcccgcagccccctcaggtgtgggatctcttacaatggcttcaggtggtggcgcaccagtggcagacaataacgaaggtgccgatggagtgggtagttcctcgggaaattggcattgcgattcccaatggctgggggacagagtcatcaccaccagcacccgaacctgggccctgcccacctacaacaatcacctctacaagcaaatctccaacagcacatctggaggatcttcaaatgacaacgcctacttcggctacagcaccccctgggggtattttgacttcaacagattccactgccacttctcaccacgtgactggcagcgactcatcaacaacaactggggattccggcctaagcgactcaacttcaagctcttcaacattcaggtcaaagaggttacggacaacaatggaacgaagaccatcgccaataaccttaccagcacggtccaggtcttcacggactcagactatcagctcccgtacgtgctcgggtcggctcacgagggctgcctcccgccgttcccagcggacgttttcatgattcctcagtacgggtatctgacgcttaatgatggaagccaggccgtgggtcgttcgtccttttactgcctggaatatttcccgtcgcaaatgctaagaacgggtaacaacttccagttcagctacgagtttgagaacgtacctttccatagcagctacgctcacagccaaagcctggaccgactaatgaatccactcatcgaccaatacttgtactatctctcaaagactattaacggttctggacagaatcaacaaacgctaaaattcagtgtggccggacccagcaacatggctgtccagggaagaaactacatacctggacccagctaccgacaacaacgtgtctcaaccactgtgactcaaaacaacaacagcgaatttgcttggcctggagcttcttcttgggctctcaatggacgtaatagcttgatgaatcctggacctgctatggccagccacaaagaaggagaggaccgtttctttcctttgtctggatctttaatttttggcaaacaaggaactggaagagacaacgtggatgcggacaaagtcatgataaccaacgaagaagaaattaaaactactaacccggtagcaacggagtcctatggacaagtggccacaaaccaccagagtgcccaagcacaggcgcagaccggctgggttcaaaaccaaggaatacttccgggtatggtttggcaggacagagatgtgtacctgcaaggacccatttgggccaaaattcctcacacggacggcaactttcacccttctccgctgatgggagggtttggaatgaagcacccgcctcctcagatcctcatcaaaaacacacctgtacctgcggatcctccaacggccttcaacaaggacaagctgaactctttcatcacccagtattctactggccaagtcagcgtggagatcgagtgggagctgcagaaggaaaacagcaagcgctggaacccggagatccagtacacttccaactattacaagtctaataatgttgaatttgctgttaatactgaaggtgtatatagtgaaccccgccccattggcaccagatacctgactcgtaatctg

SEQ ID NO: 416 - protein, 736 aa, synthetic construct
  REGION 1..736: note = Adeno Associated Virus Capsid Protein Variant
MAADGYLPDWLEDNLSEGIREWWALKPGAPQPKANQQHQDNARGLVLPGYKYLGPGNGLDKGEPVNAADAAALEHDKAYDQQLKAGDNPYLKYNHADAEFQERLKEDTSFGGNLGRAVFQAKKRLLEPLGLVEEAAKTAPGKKRPVEQSPQEPDSSAGIGKSGAQPAKKRLNFGQTGDTESVPDPQPIGEPPAAPSGVGSLTMASGGGAPVADNNEGADGVGSSSGNWHCDSQWLGDRVITTSTRTWALPTYNNHLYKQISNSTSGGSSNDNAYFGYSTPWGYFDFNRFHCHFSPRDWQRLINNNWGFRPKRLNFKLFNIQVKEVTDNNGTKTIANNLTSTVQVFTDSDYQLPYVLGSAHEGCLPPFPADVFMIPQYGYLTLNDGSQAVGRSSFYCLEYFPSQMLRTGNNFQFSYEFENVPFHSSYAHSQSLDRLMNPLIDQYLYYLSKTINGSGQNQQTLKFSVAGPSNMAVQGRNYIPGPSYRQQRVSTTVTQNNNSEFAWPGASSWALNGRNSLMNPGPAMASHKEGEDRFFPLSGSLIFGKQGTGRDNVDADKVMITNEEEIKTTNPVATESYGQVATNHQSAQAQAQTGWVQNQGILPGMVWQDRDVYLQGPIWAKIPHTDGNFHPSPLMGGFGMKHPPPQILIKNTPVPADPPTAFNKDKLNSFITQYSTGQVSVEIEWELQKENSKRWNPEIQYTSNYYKSNNVEFAVNTEGVYSEPRPIGTRYLTRNL

SEQ ID NO: 417 - DNA, 2208 bp, synthetic construct
  misc_feature 1..2208: note = Adeno Associated Virus Capsid Protein Variant
  source 1..2208: mol_type = other DNA
atggctgccgatggttatcttccagattggctcgaggacaaccttagtgaaggaattcgcgagtggtgggctttgaaacctggagcccctcaacccaaggcaaatcaacaacatcaagacaacgctcgaggtcttgtgcttccgggttacaaataccttggacccggcaacggactcgacaagggggagccggtcaacgcagcagacgcggcggccctcgagcacgacaaggcctacgaccagcagctcaaggccggagacaacccgtacctcaagtacaaccacgccgacgccgagttccaggagcggctcaaagaagatacgtcttttgggggcaacctcgggcgagcagtcttccaggccaaaaagaggctgcttgaacctcttggtctggttgaggaagcggctaagacggctcctggaaagaagaggcctgtagagcagtctcctcaggaaccggactcctccgcgggtattggcaaatcgggtgcacagcccgctaaaaagagactcaatttcggtcagactggcgacacagagtcagtcccagaccctcaaccaatcggagaacctcccgcagccccctcaggtgtgggatctcttacaatggcttcaggtggtggcgcaccagtggcagacaataacgaaggtgccgatggagtgggtagttcctcgggaaattggcattgcgattcccaatggctgggggacagagtcatcaccaccagcacccgaacctgggccctgcccacctacaacaatcacctctacaagcaaatctccaacagcacatctggaggatcttcaaatgacaacgcctacttcggctacagcaccccctgggggtattttgacttcaacagattccactgccacttctcaccacgtgactggcagcgactcatcaacaacaactggggattccggcctaagcgactcaacttcaagctcttcaacattcaggtcaaagaggttacggacaacaatggagtcaagaccatcgccaataaccttaccagcacggtccaggtcttcacggactcagactatcagctcccgtacgtgctcgggtcggctcacgagggctgcctcccgccgttcccagcggacgttttcatgattcctcagtacgggtatctgacgcttaatgatggaagccaggccgtgggtcgttcgtccttttactgcctggaatatttcccgtcgcaaatgctaagaacgggtaacaacttccagttcagctacgagtttgagaacgtacctttccatagcagctacgctcacagccaaagcctggaccgactaatgaatccactcatcgaccaatacttgtactatctctcaaagactattaacggttctggacagaatcaacaaacgctaaaattcagtgtcgccggacccagcaacatggctgtccagggaagaaactacctgcctggacccagctaccgacaacaacgtgtctcaaccactgtgactcaaaacaacaacagcgaatttgcttggacgggagcttctagttggcatctcaatggacgtaatagcttgatgaatcctggacctgctatggccagccacaaagaaggtgaggaccgtttctttcctttgtctggatctttaatttttggcaaacaaggaactggaagagacaacgtggatgcggacaaagtcatgataaccaacgaagaagaaattaaaactactaacccggtagcaacggagtcctatggacaagtggccacaaaccaccagagtgcccaaactcaggcgcagaccggctgggttcaaaaccaaggaatacttccgggtatggtttggcaggacagagatgtgtacctgcaaggacccatttgggccaaaattcctcacacggacggcaactttcacccttctccgctgatgggagggtttggaatgaagcacccgcctcctcagatcctcatcaaaaacacacctgtacctgcggatcctccaacggccttcaacaaggacaagctgaactctttcatcacccagtattctactggccaagtcagcgtggagatcgagtgggagctgcagaaggaaaacagcaagcgctggaacccggagatccagtacacttccaactattacaagtctaataatgttgaatttgctgttaatactgaaggtgtatatagtgaaccccgccccattggcaccagatacctgactcgtaatctg

SEQ ID NO: 418 - protein, 736 aa, synthetic construct
  REGION 1..736: note = Adeno Associated Virus Capsid Protein Variant
MAADGYLPDWLEDNLSEGIREWWALKPGAPQPKANQQHQDNARGLVLPGYKYLGPGNGLDKGEPVNAADAAALEHDKAYDQQLKAGDNPYLKYNHADAEFQERLKEDTSFGGNLGRAVFQAKKRLLEPLGLVEEAAKTAPGKKRPVEQSPQEPDSSAGIGKSGAQPAKKRLNFGQTGDTESVPDPQPIGEPPAAPSGVGSLTMASGGGAPVADNNEGADGVGSSSGNWHCDSQWLGDRVITTSTRTWALPTYNNHLYKQISNSTSGGSSNDNAYFGYSTPWGYFDFNRFHCHFSPRDWQRLINNNWGFRPKRLNFKLFNIQVKEVTDNNGVKTIANNLTSTVQVFTDSDYQLPYVLGSAHEGCLPPFPADVFMIPQYGYLTLNDGSQAVGRSSFYCLEYFPSQMLRTGNNFQFSYEFENVPFHSSYAHSQSLDRLMNPLIDQYLYYLSKTINGSGQNQQTLKFSVAGPSNMAVQGRNYLPGPSYRQQRVSTTVTQNNNSEFAWTGASSWHLNGRNSLMNPGPAMASHKEGEDRFFPLSGSLIFGKQGTGRDNVDADKVMITNEEEIKTTNPVATESYGQVATNHQSAQTQAQTGWVQNQGILPGMVWQDRDVYLQGPIWAKIPHTDGNFHPSPLMGGFGMKHPPPQILIKNTPVPADPPTAFNKDKLNSFITQYSTGQVSVEIEWELQKENSKRWNPEIQYTSNYYKSNNVEFAVNTEGVYSEPRPIGTRYLTRNL

SEQ ID NO: 419 - DNA, 2208 bp, synthetic construct
  misc_feature 1..2208: note = Adeno Associated Virus Capsid Protein Variant
  source 1..2208: mol_type = other DNA
atggctgccgatggttatcttccagattggctcgaggacaaccttagtgaaggaattcgcgagtggtgggctttgaaacctggagcccctcaacccaaggcaaatcaacaacatcaagacaacgctcgaggtcttgtgcttccgggttacaaataccttggacccggtaacggactcgacaagggggagccggtcaacgcagcagacgcggcggccctcgagcacgacaaggcctacgaccagcagctcaaggccggagacaacccgtacctcaagtacaaccacgccgacgccgagttccaggagcggctcaaagaagatacgtcttttgggggcaacctcgggcgagcagtcttccaggccaaaaagaggcttcttgaacctcttggtctggttgaggaagcggctaagacggctcctggaaagaagaggcctgtagagcagtctcctcaggaaccggactcctccgcgggtattggcaaatcgggtgcacagcccgctaaaaagagactcaatttcggtcagactggcgacacagagtcagtcccagaccctcaaccaatcggagaacctcccgcagccccctcaggtgtgggatctcttacaatggcttcaggtggtggcgcaccagtggcagacaataacgaaggtgccgatggagtgggtagttcctcgggaaattggcattgcgattcccaatggctgggggacagagtcatcaccaccagcacccgaacctgggccctgcccacctacaacaatcacctctacaagcaaatctccaacagcacatctggaggatcttcaaatgacaacgcctacttcggctacagcaccccctgggggtattttgacttcaacagattccactgccacttctcaccacgtgactggcagcgactcatcaacaacaactggggattccggcctaagcgactcaacttcaagctcttcaacattcaggtcaaagaggttacggacaacaatggaacgaagaccatcgccaataaccttaccagcacggtccaggtcttcacggactcagactatcagctcccgtacgtgctcgggtcggctcacgagggctgcctcccgccgttcccagcggacgttttcatgattcctcagtacgggtatctgacgcttaatgatggaagccaggccgtgggtcgttcgtccttttactgcctggaatatttcccgtcgcaaatgctaagaacgggtaacaacttccagttcagctacgagtttgagaacgtacctttccatagcagctacgctcacagccaaagcctggaccgactaatgaatccactcatcgaccaatacttgtactatctctcaaagactattaacggttctggacagaatcaacaaacgctaaaattcagtgtggccggacccagcaacatggctgtccagggaagaaactggatacctggacccagttaccgacaacaacgtgtctcaaccactgtgactcaaaacaacaacagcgaatttgcttggcctggagcttcttcttgggctctcaatggacgtaatagcttgatgaatcctggacctgctatggccagccacaaagaaggagaggaccgtttctttcctttgtctggatctttaatttttggcaaacaaggaactggaagagacaacgtggatgcggacaaagtcatgataaccaacgaagaagaaattaaaactactaacccggtagcaacggagtcctatggacaagtggccacaaaccaccagagtgcccaagcacaggcgcagaccggctgggttcaaaaccaaggaatacttccgggtatggtttggcaggacagagatgtgtacctgcaaggacccatttgggccaaaattcctcacacggacggcaactttcacccttctccgctgatgggagggtttggaatgaagcacccgcctcctcagatcctcatcaaaaacacacctgtacctgcggatcctccaacggccttcaacaaggacaagctgaactctttcatcacccagtattctactggccaagtcagcgtggagatcgagtgggagctgcagaaggaaaacagcaagcgctggaacccggagatccagtacacttccaactattacaagtctaataatgttgaatttgctgttaatactgaaggtgtatatagtgaaccccgccccattggcaccagatacctgactcgtaatctg

SEQ ID NO: 420 - protein, 736 aa, synthetic construct
  REGION 1..736: note = Adeno Associated Virus Capsid Protein Variant
MAADGYLPDWLEDNLSEGIREWWALKPGAPQPKANQQHQDNARGLVLPGYKYLGPGNGLDKGEPVNAADAAALEHDKAYDQQLKAGDNPYLKYNHADAEFQERLKEDTSFGGNLGRAVFQAKKRLLEPLGLVEEAAKTAPGKKRPVEQSPQEPDSSAGIGKSGAQPAKKRLNFGQTGDTESVPDPQPIGEPPAAPSGVGSLTMASGGGAPVADNNEGADGVGSSSGNWHCDSQWLGDRVITTSTRTWALPTYNNHLYKQISNSTSGGSSNDNAYFGYSTPWGYFDFNRFHCHFSPRDWQRLINNNWGFRPKRLNFKLFNIQVKEVTDNNGTKTIANNLTSTVQVFTDSDYQLPYVLGSAHEGCLPPFPADVFMIPQYGYLTLNDGSQAVGRSSFYCLEYFPSQMLRTGNNFQFSYEFENVPFHSSYAHSQSLDRLMNPLIDQYLYYLSKTINGSGQNQQTLKFSVAGPSNMAVQGRNWIPGPSYRQQRVSTTVTQNNNSEFAWPGASSWALNGRNSLMNPGPAMASHKEGEDRFFPLSGSLIFGKQGTGRDNVDADKVMITNEEEIKTTNPVATESYGQVATNHQSAQAQAQTGWVQNQGILPGMVWQDRDVYLQGPIWAKIPHTDGNFHPSPLMGGFGMKHPPPQILIKNTPVPADPPTAFNKDKLNSFITQYSTGQVSVEIEWELQKENSKRWNPEIQYTSNYYKSNNVEFAVNTEGVYSEPRPIGTRYLTRNL

SEQ ID NO: 421 - DNA, 2208 bp, synthetic construct
  misc_feature 1..2208: note = Adeno Associated Virus Capsid Protein Variant
  source 1..2208: mol_type = other DNA
atggctgccgatggttatcttccagattggctcgaggacaaccttagtgaaggaattcgcgagtggtgggctttgaaacctggagcccctcaacccaaggcaaatcaacaacatcaagacaacgctcgaggtcttgtgcttccgggttacaaataccttggaccctttaacggactcgacaagggggagccggtcaacgcagcagacgcggcggccctcgagcacgacaaggcctacgaccagcagctcaaggccggagacaacccgtacctcaagtacaaccacgccgacgccgagttccaggagcggctcaaagaagatacgtcttttgggggcaacctcgggcgagcagtcttccaggccaaaaagaggcttcttgaacctcttggtctggttgaggaagcggctaagacggctcctggaaagaagaggcctgtagagcagtctcctcaggaaccggactcctccgcgggtattggcaaatcgggtgcacagcccgctaaaaagagactcaatttcggtcagactggcgacacagagtcagtcccagaccctcaaccaatcggagaacctcccgcagccccctcaggtgtgggatctcttacaatggcttcaggtggtggcgcaccagtggcagacaataacgaaggtgccgatggagtgggtagttcctcgggaaattggcattgcgattcccaatggctgggggacagagtcatcaccaccagcacccgaacctgggccctgcccacctacaacaatcacctctacaagcaaatctccaacagcacatctggaggatcttcaaatgacaacgcctacttcggctacagcaccccctgggggtattttgacttcaacagattccactgccacttctcaccacgtgactggcagcgactcatcaacaacaactggggattccggcctaagcgactcaacttcaagctcttcaacattcaggtcaaagaggttacggacaacaatggaacgaagaccatcgccaataaccttaccagcacggtccaggtcttcacggactcagactatcagctcccgtacgtgctcgggtcggctcacgagggctgcctcccgccgttcccagcggacgttttcatgattcctcagtacgggtatctgacgcttaatgatggaagccaggccgtgggtcgttcgtccttttactgcctggaatatttcccgtcgcaaatgctaagaacgggtaacaacttccagttcagctacgagtttgagaacgtacctttccatagcagctacgctcacagccaaagcctggaccgactaatgaatccactcatcgaccaatacttgtactatctctcaaagactattaacggttctggacagaatcaacaaacgctaaaattcagtgtggccggacccagcaacatggctgtccagggaagaaactggatacctggaccctgttaccgacaacaacgtgtctcaaccactgtgactcaaaacaacaacagcgaatttgcttggcctggagcttcttcttgggctctcaatggacgtaatagcttgatgaatcctggacctgctatggccagccacaaagaaggagaggaccgtttctttcctttgtctggatctttaatttttggcaaacaaggaactggaagagacaacgtggatgcggacaaagtcatgataaccaacgaagaagaaattaaaactactaacccggtagcaacggagtcctatggacaagtggccacaaaccaccagagtgcccaagcacaggcgcagaccggctgggttaataaccaaggaatacttccgggtatggtttggcaggacagagatgtgtacctgcaaggacccatttgggccaaaattcctcacacggacggcaactttcacccttctccgctgatgggagggtttggaatgaagcacccgcctcctcagatcctcatcaaaaacacacctgtacctgcggatcctccaacggccttcaacaaggacaagctgaactctttcatcacccagtattctactggccaagtcagcgtggagatcgagtgggagctgcagaaggaaaacagcaagcgctggaacccggagatccagtacacttccaactattacaagtctaataatgttgagtttgctgttaatactgaaggtgtatatagtgaaccccgccccattggcaccagatacctgactcgtaatctg

SEQ ID NO: 422 - protein, 736 aa, synthetic construct
  REGION 1..736: note = Adeno Associated Virus Capsid Protein Variant
MAADGYLPDWLEDNLSEGIREWWALKPGAPQPKANQQHQDNARGLVLPGYKYLGPFNGLDKGEPVNAADAAALEHDKAYDQQLKAGDNPYLKYNHADAEFQERLKEDTSFGGNLGRAVFQAKKRLLEPLGLVEEAAKTAPGKKRPVEQSPQEPDSSAGIGKSGAQPAKKRLNFGQTGDTESVPDPQPIGEPPAAPSGVGSLTMASGGGAPVADNNEGADGVGSSSGNWHCDSQWLGDRVITTSTRTWALPTYNNHLYKQISNSTSGGSSNDNAYFGYSTPWGYFDFNRFHCHFSPRDWQRLINNNWGFRPKRLNFKLFNIQVKEVTDNNGTKTIANNLTSTVQVFTDSDYQLPYVLGSAHEGCLPPFPADVFMIPQYGYLTLNDGSQAVGRSSFYCLEYFPSQMLRTGNNFQFSYEFENVPFHSSYAHSQSLDRLMNPLIDQYLYYLSKTINGSGQNQQTLKFSVAGPSNMAVQGRNWIPGPCYRQQRVSTTVTQNNNSEFAWPGASSWALNGRNSLMNPGPAMASHKEGEDRFFPLSGSLIFGKQGTGRDNVDADKVMITNEEEIKTTNPVATESYGQVATNHQSAQAQAQTGWVNNQGILPGMVWQDRDVYLQGPIWAKIPHTDGNFHPSPLMGGFGMKHPPPQILIKNTPVPADPPTAFNKDKLNSFITQYSTGQVSVEIEWELQKENSKRWNPEIQYTSNYYKSNNVEFAVNTEGVYSEPRPIGTRYLTRNL

SEQ ID NO: 423 - DNA, 2208 bp, synthetic construct
  misc_feature 1..2208: note = Adeno Associated Virus Capsid Protein Variant
  source 1..2208: mol_type = other DNA
atggctgccgatggttatcttccagattggctcgaggacaaccttagtgaaggaattcgcgagtggtgggctttgaaacctggagcccctcaacccaaggcaaatcaacaacatcaagacaacgctcgaggtcttgtgcttccgggttacaaataccttggacccggcaacggactcgacaagggggagccggtcaacgcagcagacgcggcggccctcgagcacgacaaggcctacgaccagcagctcaaggccggagacaacccgtacctcaagtacaaccacgccgacgccgagttccaggagcggctcaaagaagatacgtcttttgggggcaacctcgggcgagcagtcttccaggccaaaaagaggcttcttgaacctcttggtctggttgaggaagcggctaagacggctcctggaaagaagaggcctgtagagcagtctcctcaggaaccggactcctccgcgggtattggcaaatcgggtgcacagcccgctaaaaagagactcaatttcggtcagactggcgacacagagtcagtcccagaccctcaaccaatcggagaacctcccgcagccccctcaggtgtgggatctcttacaatggcttcaggtggtggcgcaccagtggcagacaataacgaaggtgccgatggagtgggtagttcctcgggaaattggcattgcgattcccaatggctgggggacagagtcatcaccaccagcacccgaacctgggccctgcccacctacaacaatcacctctacaagcaaatctccaacagcacatctggaggatcttcaaatgacaacgcctacttcggctacagcaccccctgggggtattttgacttcaacagattccactgccacttctcaccacgtgactggcagcgactcatcaacaacaactggggattccggcctaagcgactcaacttcaagctcttcaacattcaggtcaaagaggttacggacaacaatggagtcaagaccatcgccaataaccttaccagcacggtccaggtcttcacggactcagactatcagctcccgtacgtgctcgggtcggctcacgagggctgcctcccgccgttcccagcggacgttttcatgattcctcagtacgggtatctgacgcttaatgatggaagccaggccgtgggtcgttcgtccttttactgcctggaatatttcccgtcgcaaatgctaagaacgggtaacaacttccagttcagctacgagtttgagaacgtacctttccatagcagctacgctcacagccaaagcctggaccgactaatgaatccactcatcgaccaatacttgtactatctctcaaagactattaacggttctggacagaatcaacaaacgctaaaattcagtgtggccggacccagcaacatggctgtccagggaagaaactacatacctggacccagctaccgacaacaacgtgtcgtgaccactgtgactcaaaacaacaacagcgaatttgcttggcctggagcttcttcttgggctctcaatggacgtaatagcttgatgaatcctggacctgctatggccagccacaaagaaggagaggaccgtttctttcctttgtctggatctttaatttttggcaaacaaggaactggaagagacaacgtggatgcggacaaagtcatgataaccaacgaagaagaaattaaaactactaacccggtagcaacggagtcctatggacaagtggccacaaaccaccagagtgcccaagcacaggcgcagaccggctgggttcaaaaccaaggaatacttccgggtatggtttggcaggacagagatgtgtacctgcaaggacccatttgggccaaaattcctcacacggacggcaactttcacccttctccgctgatgggagggtttggaatgaagcacccgcctcctcagatcctcatcaaaaacacacctgtacctgcggatcctccaacggccttcaacaaggacaagctgaactctttcatcacccagtattctactggccaagtcagcgtggagatcgagtgggagctgcagaaggaaaacagcaagcgctggaacccggagatccagtacacttccaactattacaagtctaataatgttgaatttgctgttaatactgaaggtgtatatagtgaaccccgccccattggcaccagatacctgactcgtaatctg

SEQ ID NO: 424 - protein, 736 aa, synthetic construct
  REGION 1..736: note = Adeno Associated Virus Capsid Protein Variant
MAADGYLPDWLEDNLSEGIREWWALKPGAPQPKANQQHQDNARGLVLPGYKYLGPGNGLDKGEPVNAADAAALEHDKAYDQQLKAGDNPYLKYNHADAEFQERLKEDTSFGGNLGRAVFQAKKRLLEPLGLVEEAAKTAPGKKRPVEQSPQEPDSSAGIGKSGAQPAKKRLNFGQTGDTESVPDPQPIGEPPAAPSGVGSLTMASGGGAPVADNNEGADGVGSSSGNWHCDSQWLGDRVITTSTRTWALPTYNNHLYKQISNSTSGGSSNDNAYFGYSTPWGYFDFNRFHCHFSPRDWQRLINNNWGFRPKRLNFKLFNIQVKEVTDNNGVKTIANNLTSTVQVFTDSDYQLPYVLGSAHEGCLPPFPADVFMIPQYGYLTLNDGSQAVGRSSFYCLEYFPSQMLRTGNNFQFSYEFENVPFHSSYAHSQSLDRLMNPLIDQYLYYLSKTINGSGQNQQTLKFSVAGPSNMAVQGRNYIPGPSYRQQRVVTTVTQNNNSEFAWPGASSWALNGRNSLMNPGPAMASHKEGEDRFFPLSGSLIFGKQGTGRDNVDADKVMITNEEEIKTTNPVATESYGQVATNHQSAQAQAQTGWVQNQGILPGMVWQDRDVYLQGPIWAKIPHTDGNFHPSPLMGGFGMKHPPPQILIKNTPVPADPPTAFNKDKLNSFITQYSTGQVSVEIEWELQKENSKRWNPEIQYTSNYYKSNNVEFAVNTEGVYSEPRPIGTRYLTRNL

SEQ ID NO: 425 - DNA, 2208 bp, synthetic construct
  misc_feature 1..2208: note = Adeno Associated Virus Capsid Protein Variant
  source 1..2208: mol_type = other DNA
atggctgccgatggttatcttccagattggctcgaggacaaccttagtgaaggaattcgcgagtggtgggctttgaaacctggagcccctcaacccaaggcaaatcaacaacatcaagacaacgctcgaggtcttgtgcttccgggttacaaataccttggacccggcaacggactcgacaagggggagccggtcaacgcagcagacgcggcggccctcgagcacgacaaggcctacgaccagcagctcaaggccggagacaacccgtacctcaagtacaaccacgccgacgccgagttccaggagcggctcaaagaagatacgtcttttgggggcaacctcgggcgagcagtcttccaggccaaaaagaggcttcttgaacctcttggtctggttgaggaagcggctaagacggctcctggaaagaagaggcctgtagagcagtctcctcaggaaccggactcctccgcgggtattggcaaatcgggtgcacagcccgctaaaaagagactcaatttcggtcagactggcgacacagagtcagtcccagaccctcaaccaatcggagaacctcccgcagccccctcaggtgtgggatctcttacaatggcttcaggtggtggcgcaccagtggcagacaataacgaaggtgccgatggagtgggtagttcctcgggaaattggcattgcgattcccaatggctgggggacagagtcatcaccaccagcacccgaacctgggccctgcccacctacaacaatcacctctacaagcaaatctccaacagcacatctggaggatcttcaaatgacaacgcctacttcggctacagcaccccctgggggtattttgacttcaacagattccactgccacttctcaccacgtgactggcagcgactcatcaacaacaactggggattccggcctaagcgactcaacttcaagctcttcaacattcaggtcaaagaggttacggacaacaatggagtcaagaccatcgccaataaccttaccagcacggtccaggtcttcacggactcagattatcagctcccgtacgtgctcgggtcggctcacgagggctgcctcccgccgttcccagcggacgttttcatgattcctcagtacgggtatctgacgcttaatgatggaagccaggccgtgggtcgttcgtccttttactgcctggaatatttcccgtcgcaaatgctaagaacgggtaacaacttccagttcagctacgagtttgagaatgtacctttccatagcagctacgctcacagccaaagcctggaccgactaatgaatccactcatcgaccaatacttgtactatctctcaaagactattaacggttctggacagaatcaacaaacgctaaaattcagtgtcgccggacccagcaacatggctgtccagggaagaaactacctgcctggacccagctaccgacaacaacgtgtctcaaccactgtgactcaaaacaacaacagcgaatttgcttggcctggagcttcttcttgggctctcaatggacgtaatagcttgatgaatcctggacctgctatggccagccacaaagaaggagaggaccgtttctttcctttgtctggatctttaatttttggcaaacaaggaactggaagagacaacgtggatgcggacaaagtcatgataaccaacgaagaagaaattaaaactactaacccggtagcaacggagtcctatggacaagtggccacaaaccaccagagtgcccaagcacaggcgcagaccggctgggttcaaaaccaaggaatacttccgggtatggtttggcaggacagagatgtgtacctgcaaggacccatttgggccaaaattcctcacacggacggcaactttcacccttctccgctgatgggagggtttggaatgaagcacccgcctcctcagatcctcatcaaaaacacacctgtacctgcggatcctccaacggccttcaacaaggacaagctgaactctttcatcacccagtattctactggccaagtcagcgtggagatcgagtgggagctgcagaaggaaaacagcaagcgctggaacccggagatccagtacacttccaactattacaagtctaataatgttgaatttgctgttaatactgaaggtgtatatagtgaaccccgccccattggcaccagatacctgactcgtaatctg

SEQ ID NO: 426 - protein, 736 aa, synthetic construct
  REGION 1..736: note = Adeno Associated Virus Capsid Protein Variant
MAADGYLPDWLEDNLSEGIREWWALKPGAPQPKANQQHQDNARGLVLPGYKYLGPGNGLDKGEPVNAADAAALEHDKAYDQQLKAGDNPYLKYNHADAEFQERLKEDTSFGGNLGRAVFQAKKRLLEPLGLVEEAAKTAPGKKRPVEQSPQEPDSSAGIGKSGAQPAKKRLNFGQTGDTESVPDPQPIGEPPAAPSGVGSLTMASGGGAPVADNNEGADGVGSSSGNWHCDSQWLGDRVITTSTRTWALPTYNNHLYKQISNSTSGGSSNDNAYFGYSTPWGYFDFNRFHCHFSPRDWQRLINNNWGFRPKRLNFKLFNIQVKEVTDNNGVKTIANNLTSTVQVFTDSDYQLPYVLGSAHEGCLPPFPADVFMIPQYGYLTLNDGSQAVGRSSFYCLEYFPSQMLRTGNNFQFSYEFENVPFHSSYAHSQSLDRLMNPLIDQYLYYLSKTINGSGQNQQTLKFSVAGPSNMAVQGRNYLPGPSYRQQRVSTTVTQNNNSEFAWPGASSWALNGRNSLMNPGPAMASHKEGEDRFFPLSGSLIFGKQGTGRDNVDADKVMITNEEEIKTTNPVATESYGQVATNHQSAQAQAQTGWVQNQGILPGMVWQDRDVYLQGPIWAKIPHTDGNFHPSPLMGGFGMKHPPPQILIKNTPVPADPPTAFNKDKLNSFITQYSTGQVSVEIEWELQKENSKRWNPEIQYTSNYYKSNNVEFAVNTEGVYSEPRPIGTRYLTRNL

SEQ ID NO: 427 - DNA, 2208 bp, synthetic construct
  misc_feature 1..2208: note = Adeno Associated Virus Capsid Protein Variant
  source 1..2208: mol_type = other DNA
atggctgccgatggttatcttccagattggctcgaggacaaccttagtgaaggaattcgcgagtggtgggctttgaaacctggagcccctcaacccaaggcaaatcaacaacatcaagacaacgctcgaggtcttgtgcttccgggttacaaataccttggacccggcaacggactcgacaagggggagccggtcaacgcagcagacgcggcggccctcgagcacgacaaggcctacgaccagcagctcaaggccggagacaacccgtacctcaagtacaaccacgccgacgccgagttccaggagcggctcaaagaagatacgtcttttgggggcaacctcgggcgagcagtcttccaggccaaaaagagggtgcttgaacctcttggtctggttgaggaagcggctaagacggctcctggaaagaagaggcctgtagagcagtctcctcaggaaccggactcctccgcgggtattggcaaatcgggtgcacagcccgctaaaaagagactcaatttcggtcagactggcgacacagagtcagtcccagaccctcaaccaatcggagaacctcccgcagccccctcaggtgtgggatctcttacaatggcttcaggtggtggcgcaccagtggcagacaataacgaaggtgccgatggagtgggtagttcctcgggaaattggcattgcgattcccaatggctgggggacagagtcatcaccaccagcacccgaacctgggccctgcccacctacaacaatcacctctacaagcaaatctccaacagcacatctggaggatcttcaaatgacaacgcctacttcggctacagcaccccctgggggtattttgacttcaacagattccactgccacttctcaccacgtgactggcagcgactcatcaacaacaactggggattccggcctaagcgactcaacttcaagctcttcaacattcaggtcaaagaggttacggacaacaatggagtcaagaccatcgccaataaccttaccagcacggtccaggtcttcacggactcagactatcagctcccgtacgtgctcgggtcggctcacgagggctgcctcccgccgttcccagcggacgttttcatgattcctcagtacgggtatctgacgcttaatgatggaagccaggccgtgggtcgttcgtccttttactgcctggaatatttcccgtcgcaaatgctaagaacgggtaacaacttccagttcagctacgagtttgagaatgtacctttccatagcagctacgctcacagccaaagcctggaccgactaatgaatccactcatcgaccaatacttgtactatctctcaaagactattaacggttctggacagaatcaacaaacgctaaaattcagtgtggccggacccagcaacatggctgtccagggaagaaactacattcctggacccagctaccgacaacaacgtgtctcaaccactgtgactcaaaacaacaacagcgaatttgcttggacgggagcttctaagtgggctctcaatggacgtaatagcttgatgaatcctggacctgctatggccagccacaaagaaggagaggaccgtttctttcctttgtctggatctttaatttttggcaaacaaggaactggaagagacaacgtggatgcggacaaagtcatgataaccaacgaagaagaaattaaaactactaacccggtagcaacggagtcctatggacaagtggccacaaaccaccagagtgcccaagcacaggcgcagaccggctgggttcaaaaccaaggaatacttccgggtatggtttggcaggacagagatgtgtacctgcaaggacccatttgggccaaaattcctcacacggacggcaactttcacccttctccgctgatgggagggtttggaatgaagcacccgcctcctcagatcctcatcaaaaacacacctgtacctgcggatcctccaacggccttcaacaaggacaagctgaactctttcatcacccagtattctactggccaagtcagcgtggagatcgagtgggagctgcagaaggaaaacagcaagcgctggaacccggagatccagtacacttccaactattacaagtctaataatgttgaatttgctgttaatactgaaggtgtatatagtgaaccccgccccattggcaccagatacctgactcgtaatctg

SEQ ID NO: 428 - protein, 736 aa, synthetic construct
  REGION 1..736: note = Adeno Associated Virus Capsid Protein Variant
MAADGYLPDWLEDNLSEGIREWWALKPGAPQPKANQQHQDNARGLVLPGYKYLGPGNGLDKGEPVNAADAAALEHDKAYDQQLKAGDNPYLKYNHADAEFQERLKEDTSFGGNLGRAVFQAKKRVLEPLGLVEEAAKTAPGKKRPVEQSPQEPDSSAGIGKSGAQPAKKRLNFGQTGDTESVPDPQPIGEPPAAPSGVGSLTMASGGGAPVADNNEGADGVGSSSGNWHCDSQWLGDRVITTSTRTWALPTYNNHLYKQISNSTSGGSSNDNAYFGYSTPWGYFDFNRFHCHFSPRDWQRLINNNWGFRPKRLNFKLFNIQVKEVTDNNGVKTIANNLTSTVQVFTDSDYQLPYVLGSAHEGCLPPFPADVFMIPQYGYLTLNDGSQAVGRSSFYCLEYFPSQMLRTGNNFQFSYEFENVPFHSSYAHSQSLDRLMNPLIDQYLYYLSKTINGSGQNQQTLKFSVAGPSNMAVQGRNYIPGPSYRQQRVSTTVTQNNNSEFAWTGASKWALNGRNSLMNPGPAMASHKEGEDRFFPLSGSLIFGKQGTGRDNVDADKVMITNEEEIKTTNPVATESYGQVATNHQSAQAQAQTGWVQNQGILPGMVWQDRDVYLQGPIWAKIPHTDGNFHPSPLMGGFGMKHPPPQILIKNTPVPADPPTAFNKDKLNSFITQYSTGQVSVEIEWELQKENSKRWNPEIQYTSNYYKSNNVEFAVNTEGVYSEPRPIGTRYLTRNL

SEQ ID NO: 429 - DNA, 2208 bp, synthetic construct
  misc_feature 1..2208: note = Adeno Associated Virus Capsid Protein Variant
  source 1..2208: mol_type = other DNA
atggctgccgatggttatcttccagattggctcgaggacaaccttagtgaaggaattcgcgagtggtgggctttgaaacctggagcccctcaacccaaggcaaatcaacaacatcaagacaacgctcgaggtcttgtgcttccgggttacaaataccttggacccggcaacggactcgacaagggggagccggtcaacgcagcagacgcggcggccctcgagcacgacaaggcctacgaccagcagctcaaggccggagacaacccgtacctcaagtacaaccacgccgacgccgagttccaggagcggctcaaagaagatacgtcttttgggggcaacctcgggcgagcagtcttccaggccaaaaagaggcttcttgaacctcttggtctggttgaggaagcggctaagacggctcctggaaagaagaggcctgtagagcagtctcctcaggaaccggactcctccgcgggtattggcaaatcgggtgcacagcccgctaaaaagagactcaatttcggtcagactggcgacacagagtcagtcccagaccctcaaccaatcggagaacctcccgcagccccctcaggtgtgggatctcttacaatggcttcaggtggtggcgcaccagtggcagacaataacgaaggtgccgatggagtgggtagttcctcgggaaattggcattgcgattcccaatggctgggggacagagtcatcaccaccagcacccgaacctgggccctgcccacctacaacaatcacctctacaagcaaatctccaacagcacatctggaggatcttcaaatgacaacgcctacttcggctacagcaccccctgggggtattttgacttcaacagattccactgccacttctcaccacgtgactggcagcgactcatcaacaacaactggggattccggcctaagcgactcaacttcaagctcttcaacattcaggtcaaagaggttacggacaacaatggagtcaagaccatcgccaataaccttaccagcacggtccaggtcttcacggactcagattatcagctcccgtacgtgctcgggtcggctcacgagggctgcctcccgccgttcccagcggacgttttcatgattcctcagtacgggtatctgacgcttaatgatggaagccaggccgtgggtcgttcgtccttttactgcctggaatatttcccgtcgcaaatgctaagaacgggtaacaacttccagttcagctacgagtttgagaacgtacctttccatagcagctacgctcacagccaaagcctggaccgactaatgaatccactcatcgaccaatacttgtactatctctcaaagactattaacggttctggacagaatcaacaaacgctaaaattcagtgtggccggacccagcaacatggctgtccagggaagaaactacctgcctggacccagctaccgacaacaacgtgtctcaaccactgtgactcaaaacaacaacagcgaatttgcttggcctggagcttcttcttgggctctcaatggacgtaatagcttgatgaatcctggacctgctatggccagccacaaagaaggagaggaccgtttctttcctttgtctggatctttaatttttggcaaacaaggaactggaagagacaacgtggatgcggacaaagtcatgataaccaacgaagaagaaattaaaactactaacccggtagcaacggagtcctatggacaagtggccacaaaccaccagagtgcccaaactcaggcgcagaccggctgggttcaaaaccaaggaatacttccgggtatggtttggcaggacagagatgtgtacctgcaaggacccatttgggccaaaattcctcacacggacggcaactttcacccttctccgctgatgggagggtttggaatgaagcacccgcctcctcagatcctcatcaaaaacacacctgtacctgcggatcctccaacggccttcaacaaggacaagctgaactctttcatcacccagtattctactggccaagtcagcgtggagatcgagtgggagctgcagaaggaaaacagcaagcgctggaacccggagatccagtacacttccaactattacaagtctaataatgttgaatttgctgttaatactgaaggtgtatatagtgaaccccgccccattggcaccagatacctgactcgtaatctg

SEQ ID NO: 430 - protein, 736 aa, synthetic construct
  REGION 1..736: note = Adeno Associated Virus Capsid Protein Variant
MAADGYLPDWLEDNLSEGIREWWALKPGAPQPKANQQHQDNARGLVLPGYKYLGPGNGLDKGEPVNAADAAALEHDKAYDQQLKAGDNPYLKYNHADAEFQERLKEDTSFGGNLGRAVFQAKKRLLEPLGLVEEAAKTAPGKKRPVEQSPQEPDSSAGIGKSGAQPAKKRLNFGQTGDTESVPDPQPIGEPPAAPSGVGSLTMASGGGAPVADNNEGADGVGSSSGNWHCDSQWLGDRVITTSTRTWALPTYNNHLYKQISNSTSGGSSNDNAYFGYSTPWGYFDFNRFHCHFSPRDWQRLINNNWGFRPKRLNFKLFNIQVKEVTDNNGVKTIANNLTSTVQVFTDSDYQLPYVLGSAHEGCLPPFPADVFMIPQYGYLTLNDGSQAVGRSSFYCLEYFPSQMLRTGNNFQFSYEFENVPFHSSYAHSQSLDRLMNPLIDQYLYYLSKTINGSGQNQQTLKFSVAGPSNMAVQGRNYLPGPSYRQQRVSTTVTQNNNSEFAWPGASSWALNGRNSLMNPGPAMASHKEGEDRFFPLSGSLIFGKQGTGRDNVDADKVMITNEEEIKTTNPVATESYGQVATNHQSAQTQAQTGWVQNQGILPGMVWQDRDVYLQGPIWAKIPHTDGNFHPSPLMGGFGMKHPPPQILIKNTPVPADPPTAFNKDKLNSFITQYSTGQVSVEIEWELQKENSKRWNPEIQYTSNYYKSNNVEFAVNTEGVYSEPRPIGTRYLTRNL

SEQ ID NO: 431 - DNA, 2208 bp, synthetic construct
  misc_feature 1..2208: note = Adeno Associated Virus Capsid Protein Variant
  source 1..2208: mol_type = other DNA
atggctgccgatggttatcttccagattggctcgaggacaaccttagtgaaggaattcgcgagtggtgggctttgaaacctggagcccctcaacccaaggcaaatcaacaacatcaagacaacgctcgaggtcttgtgcttccgggttacaaataccttggacccggcaacggactcgacaagggggagccggtcaacgcagcagacgcggcggccctcgagcacgacaaggcctacgaccagcagctcaaggccggagacaacccgtacctcaagtacaaccacgccgacgccgagttccaggagcggctcaaagaagatacgtcttttgggggcaacctcgggcgagcagtcttccaggccaaaaagaggctgcttgaacctcttggtctggttgaggaagcggctaagacggctcctggaaagaagaggcctgtagagcagtctcctcaggaaccggactcctccgcgggtattggcaaatcgggtgcacagcccgctaaaaagagactcaatttcggtcagactggcgacacagagtcagtcccagaccctcaaccaatcggagaacctcccgcagccccctcaggtgtgggatctcttacaatggcttcaggtggtggcgcaccagtggcagacaataacgaaggtgccgatggagtgggtagttcctcgggaaattggcattgcgattcccaatggctgggggacagagtcatcaccaccagcacccgaacctgggccctgcccacctacaacaatcacctctacaagcaaatctccaacagcacatctggaggatcttcaaatgacaacgcctacttcggctacagcaccccctgggggtattttgacttcaacagattccactgccacttctcaccacgtgactggcagcgactcatcaacaacaactggggattccggcctaagcgactcaacttcaagctcttcaacattcaggtcaaagaggttacggacaacaatggagtcaagaccatcgccaataaccttaccagcacggtccaggtcttcacggactcagactatcagctcccgtacgtgctcgggtcggctcacgagggctgcctcccgccgttcccagcggacgttttcatgattcctcagtacgggtatctgacgcttaatgatggaagccaggccgtgggtcgttcgtccttttactgcctggaatatttcccgtcgcaaatgctaagaacgggtaacaacttccagttcagctacgagtttgagaacgtacctttccatagcagctacgctcacagccaaagcctggaccgactaatgaatccactcatcgaccaatacttgtactatctctcaaagactattaacggttctggacagaatcaacaaacgctaaaattcagtgtcgccggacccagcaacatggctgtccagggaagaaactacctgcctggacccagctaccgacaacaacgtgtctcaaccactgtgactcaaaacaacaacagcgaatttgcttggccgggagcttctagttggcatctcaatggacgtaatagcttgatgaatcctggacctgctatggccagccacaaagaaggtgaggaccgtttctttcctttgtctggatctttaatttttggcaaacaaggaactggaagagacaacgtggatgcggacaaagtcatgataaccaacgaagaagaaattaaaactactaacccggtagcaacggagtcctatggacaagtggccacaaaccaccagagtgcccaaactcaggcgcagaccggctgggttcaaaaccaaggaatacttccgggtatggtttggcaggacagagatgtgtacctgcaaggacccatttgggccaaaattcctcacacggacggcaactttcacccttctccgctgatgggagggtttggaatgaagcacccgcctcctcagatcctcatcaaaaacacacctgtacctgcggatcctccaacggccttcaacaaggacaagctgaactctttcatcacccagtattctactggccaagtcagcgtggagatcgagtgggagctgcagaaggaaaacagcaagcgctggaacccggagatccagtacacttccaactattacaagtctaataatgttgaatttgctgttaatactgaaggtgtatatagtgaaccccgccccattggcaccagatacctgactcgtaatctg

SEQ ID NO: 432 - protein, 736 aa, synthetic construct
  REGION 1..736: note = Adeno Associated Virus Capsid Protein Variant
MAADGYLPDWLEDNLSEGIREWWALKPGAPQPKANQQHQDNARGLVLPGYKYLGPGNGLDKGEPVNAADAAALEHDKAYDQQLKAGDNPYLKYNHADAEFQERLKEDTSFGGNLGRAVFQAKKRLLEPLGLVEEAAKTAPGKKRPVEQSPQEPDSSAGIGKSGAQPAKKRLNFGQTGDTESVPDPQPIGEPPAAPSGVGSLTMASGGGAPVADNNEGADGVGSSSGNWHCDSQWLGDRVITTSTRTWALPTYNNHLYKQISNSTSGGSSNDNAYFGYSTPWGYFDFNRFHCHFSPRDWQRLINNNWGFRPKRLNFKLFNIQVKEVTDNNGVKTIANNLTSTVQVFTDSDYQLPYVLGSAHEGCLPPFPADVFMIPQYGYLTLNDGSQAVGRSSFYCLEYFPSQMLRTGNNFQFSYEFENVPFHSSYAHSQSLDRLMNPLIDQYLYYLSKTINGSGQNQQTLKFSVAGPSNMAVQGRNYLPGPSYRQQRVSTTVTQNNNSEFAWPGASSWHLNGRNSLMNPGPAMASHKEGEDRFFPLSGSLIFGKQGTGRDNVDADKVMITNEEEIKTTNPVATESYGQVATNHQSAQTQAQTGWVQNQGILPGMVWQDRDVYLQGPIWAKIPHTDGNFHPSPLMGGFGMKHPPPQILIKNTPVPADPPTAFNKDKLNSFITQYSTGQVSVEIEWELQKENSKRWNPEIQYTSNYYKSNNVEFAVNTEGVYSEPRPIGTRYLTRNL

SEQ ID NO: 433 - DNA, 2208 bp, synthetic construct
  misc_feature 1..2208: note = Adeno Associated Virus Capsid Protein Variant
  source 1..2208: mol_type = other DNA
atggctgccgatggttatcttccagattggctcgaggaccggcttagtgaaggaattcgcgagtggtgggctttgaaacctggagcccctcaacccaaggcaaatcaacaacatcaagacaacgctcgaggtcttgtgcttccgggttacaaataccttggacccggcaacggactcgacaagggggagccggtcaacgcagcagacgcggcggccctcgagcacgacaaggcctacgaccagcagctcaaggccggagacaacccgtacctcaagtacaaccacgccgacgccgagttccaggagcggctcaaagaagatacgtcttttgggggcaacctcgggcgagcagtcttccaggccaaaaagaggcttcttgaacctcttggtctggttgaggaagcggctaagacggctcctggaaagaagaggcctgtagagcagtctcctcaggaaccggactcctccgcgggtattggcaaatcgggtgcacagcccgctaaaaagagactcaatttcggtcagactggcgacacagagtcagtcccagaccctcaaccaatcggagaacctcccgcagccccctcaggtgtgggatctcttacaatggcttcaggtggtggcgcaccagtggcagacaataacgaaggtgccgatggagtgggtagttcctcgggaaattggcattgcgattcccaatggctgggggacagagtcatcaccaccagcacccgaacctgggccctgcccacctacaacaatcacctctacaagcaaatctccaacagcacatctggaggatcttcaaatgacaacgcctacttcggctacagcaccccctgggggtattttgacttcaacagattccactgccacttctcaccacgtgactggcagcgactcatcaacaacaactggggattccggcctaagcgactcaacttcaagctcttcaacattcaggtcaaagaggttacggacaacaatggagtcaagaccatcgccaataaccttaccagcacggtccaggtcttcacggactcagactatcagctcccgtacgtgctcgggtcggctcacgagggctgcctcccgccgttcccagcggacgttttcatgattcctcagtacgggtatctgacgcttaatgatggaagccaggccgtgggtcgttcgtccttttactgcctggaatatttcccgtcgcaaatgctaagaacgggtaacaacttccagttcagctacgagtttgagaacgtacctttccatagcagctacgctcacagccaaagcctggaccgactaatgaatccactcatcgaccaatacttgtactatctctcaaagactattaacggttctggacagaatcaacaaacgctaaaattcagtgtggccggacccagcaacatggctgtccagggaagaaactacatacctggacccagctaccgacaacaacgtgtctcaaccactgtgactcaaaacaacaacagcgaatttgcttggcctggagcttcttcttgggctctcaatggacgtaatagcttgatgaatcctggacctgctatggccagccacaaagaaggagaggaccgtttctttcctttgtctggatctttaatttttggcaaacaaggaactggaagagacaacgtggatgcggacaaagtcatgataaccaacgaagaagaaattaaaactactaacccggtagcaacggagtcctatggacaagtggccacaaaccaccagagtgcccgggcacaggcgcagaccggctgggttcaaaaccaaggaatacttccgggtatggtttggcaggacagagatgtgtacctgcaaggacccatttgggccaaaattcctcacacggacggcaactttcacccttctccgctgatgggagggtttggaatgaagcacccgcctcctcagatcctcatcaaaaacacacctgtacctgcggatcctccaacggccttcaacaagggcaagctgaactctttcatcacccagtattctactggccaagtcagcgtggagatcgagtgggagctgcagaaggaaaacagcaagcgctggaacccggagatccagtacacttccaactattacaagtctaataatgttgaatttgctgttaatactgaaggtgtatatagtgaaccccgccccattggcaccagatacctgactcgtaatctg

SEQ ID NO: 434 - protein, 736 aa, synthetic construct
  REGION 1..736: note = Adeno Associated Virus Capsid Protein Variant
MAADGYLPDWLEDRLSEGIREWWALKPGAPQPKANQQHQDNARGLVLPGYKYLGPGNGLDKGEPVNAADAAALEHDKAYDQQLKAGDNPYLKYNHADAEFQERLKEDTSFGGNLGRAVFQAKKRLLEPLGLVEEAAKTAPGKKRPVEQSPQEPDSSAGIGKSGAQPAKKRLNFGQTGDTESVPDPQPIGEPPAAPSGVGSLTMASGGGAPVADNNEGADGVGSSSGNWHCDSQWLGDRVITTSTRTWALPTYNNHLYKQISNSTSGGSSNDNAYFGYSTPWGYFDFNRFHCHFSPRDWQRLINNNWGFRPKRLNFKLFNIQVKEVTDNNGVKTIANNLTSTVQVFTDSDYQLPYVLGSAHEGCLPPFPADVFMIPQYGYLTLNDGSQAVGRSSFYCLEYFPSQMLRTGNNFQFSYEFENVPFHSSYAHSQSLDRLMNPLIDQYLYYLSKTINGSGQNQQTLKFSVAGPSNMAVQGRNYIPGPSYRQQRVSTTVTQNNNSEFAWPGASSWALNGRNSLMNPGPAMASHKEGEDRFFPLSGSLIFGKQGTGRDNVDADKVMITNEEEIKTTNPVATESYGQVATNHQSARAQAQTGWVQNQGILPGMVWQDRDVYLQGPIWAKIPHTDGNFHPSPLMGGFGMKHPPPQILIKNTPVPADPPTAFNKGKLNSFITQYSTGQVSVEIEWELQKENSKRWNPEIQYTSNYYKSNNVEFAVNTEGVYSEPRPIGTRYLTRNL

SEQ ID NO: 435 - DNA, 2208 bp, synthetic construct
  misc_feature 1..2208: note = Adeno Associated Virus Capsid Protein Variant
  source 1..2208: mol_type = other DNA
atggctgccgatggttatcttccagattggctcgaggacaaccttagtgaaggaattcgcgagtggtgggctttgaaacctggagcccctcaacccaaggcaaatcaacaacatcaagacaacgctcgaggtcttgtgcttccgggttacaaataccttggacccggcaacggactcgacaagggggagccggtcaacgcagcagacgcggcggccctcgagcacgacaaggcctacgaccagcagctcaaggccggagacaacccgtacctcaagtacaaccacgccgacgccgagttccaggagcggctcaaagaagatacgtcttttgggggcaacctcgggcgagcagtcttccaggccaaaaagaggcttcttgaacctcttggtctggttgaggaagcggctaagacggctcctggaaagaagaggcctgtagagcagtctcctcaggaaccggactcctccgcgggtattggcaaatcgggtgcacagcccgctaaaaagagactcaattcgggtcagactggcgacacagagtcagtcccagaccctcaaccaatcggagaacctcccgcagccccctcaggtgtgggatctcttacaatggcttcaggtggtggcgcaccagtggcagacaataacgaaggtgccgatggagtgggtagttcctcgggaaattggcattgcgattcccaatggctgggggacagagtcatcaccaccagcacccgaacctgggccctgcccacctacaacaatcacctctacaagcaaatctccaacagcacatctggaggatcttcaaatgacaacgcctacttcggctacagcaccccctgggggtattttgacttcaacagattccactgccacttctcaccacgtgactggcagcgactcatcaacaacaactggggattccggcctaagcgactcaacttcaagctcttcaacattcaggtcaaagaggttacggacaacaatggagtcaagaccatcgccaataaccttaccagcacggtccaggtcttcacggactcagactatcagctcccgtacgtgctcgggtcggctcacgagggctgcctcccgccgttcccagcggacgttttcatgattcctcagtacgggtatctgacgcttaatgatggaagccaggccgtgggtcgttcgtccttttactgcctggaatatttcccgtcgcaaatgctaagaacgggtaacaacttccagttcagctacgagtttgagaacgtacctttccatagcagctacgctcacagccaaagcctggaccgactaatgaatccactcatcgaccaatacttgtactatctctcaaagactattaacggttctggacagaatcaacaaacgctaaaattcagtgtggccggacccagcaacatggctgtccagggaagaaactacatacctggacccagctaccgacaacaacgtgtctcaaccactgtgactcaaaacaacaacagcgaatttgcttggcctggagcttcttcttgggctctcaatggacgtaatagcttgatgaatcctggacctgctatggccagccacaaagaaggagaggaccgtttctttcctttgtctggatctttaatttttggcaaacaaggaactggaagagacaacgtggatgcggacaaagtcatgataaccaacgaagaagaaattaaaactactaacccggtagcaacggagtcctatggacaagtggccacaaaccaccagagtgcccgggcacaggcgcagaccggctgggttcaaaaccaaggaatacttccgggtatggtttggcaggacagagatgtgtacctgcaaggacccatttgggccaaaattcctcacacggacggcaactttcacccttctccgctgatgggagggtttggaatgaagcacccgcctcctcagatcctcatcaaaaacacacctgtacctgcggatcctccaacggccttcaacaagggcaagctgaactctttcatcacccagtattctactggccaagtcagcgtggagatcgagtgggagctgcagaaggaaaacagcaagcgctggaacccggagatccagtacacttccaactattacaagtctaataatgttgaatttgctgttaatactgaaggtgtatatagtgaaccccgccccattggcaccagatacctgactcgtaatctg

SEQ ID NO: 436 - protein, 736 aa, synthetic construct
  REGION 1..736: note = Adeno Associated Virus Capsid Protein Variant
MAADGYLPDWLEDNLSEGIREWWALKPGAPQPKANQQHQDNARGLVLPGYKYLGPGNGLDKGEPVNAADAAALEHDKAYDQQLKAGDNPYLKYNHADAEFQERLKEDTSFGGNLGRAVFQAKKRLLEPLGLVEEAAKTAPGKKRPVEQSPQEPDSSAGIGKSGAQPAKKRLNSGQTGDTESVPDPQPIGEPPAAPSGVGSLTMASGGGAPVADNNEGADGVGSSSGNWHCDSQWLGDRVITTSTRTWALPTYNNHLYKQISNSTSGGSSNDNAYFGYSTPWGYFDFNRFHCHFSPRDWQRLINNNWGFRPKRLNFKLFNIQVKEVTDNNGVKTIANNLTSTVQVFTDSDYQLPYVLGSAHEGCLPPFPADVFMIPQYGYLTLNDGSQAVGRSSFYCLEYFPSQMLRTGNNFQFSYEFENVPFHSSYAHSQSLDRLMNPLIDQYLYYLSKTINGSGQNQQTLKFSVAGPSNMAVQGRNYIPGPSYRQQRVSTTVTQNNNSEFAWPGASSWALNGRNSLMNPGPAMASHKEGEDRFFPLSGSLIFGKQGTGRDNVDADKVMITNEEEIKTTNPVATESYGQVATNHQSARAQAQTGWVQNQGILPGMVWQDRDVYLQGPIWAKIPHTDGNFHPSPLMGGFGMKHPPPQILIKNTPVPADPPTAFNKGKLNSFITQYSTGQVSVEIEWELQKENSKRWNPEIQYTSNYYKSNNVEFAVNTEGVYSEPRPIGTRYLTRNL

SEQ ID NO: 437 - DNA, 2208 bp, synthetic construct
  misc_feature 1..2208: note = Adeno Associated Virus Capsid Protein Variant
  source 1..2208: mol_type = other DNA
atggctgccgatggttatcttccagattggctcgaggacaaccttagtgaaggaattcgcgagtggtgggctttgaaacctggagcccctcaacccaaggcaaatcaacaacatcaagacaacgctcgaggtcttgtgcttccgggttacaaataccttggacccggcaacggactcgacaagggggagccggtcaacgcagcagacgcggcggccctcgagcacgacaaggcctacgaccagcagctcaaggccggagacaacccgtacctcaagtacaaccacgccgacgccgagttccaggagcggctcaaagaagatacgtcttttgggggcaacctcgggcgagcagtcttccaggccaaaaagaggcttcttgaacctcttggtctggttgaggaagcggctaagacggctcctggaaagaagaggcctgtagagcagtctcctcaggaaccggactcctccgcgggtaggggcaaatcgggtgcacagcccgctaaaaagagactcaatttcggtcagactggcgacacagagtcagtcccagaccctcaaccaatcggagaacctcccgcagccccctcaggtgtgggatctcttacaatggcttcaggtggtggcgcaccagtggcagacaataacgaaggtgccgatggagtgggtagttcctcgggaaattggcattgcgattcccaatggctgggggacagagtcatcaccaccagcacccgaacctgggccctgcccacctacaacaatcacctctacaagcaaatctccaacagcacatctggaggatcttcaaatgacaacgcctacttcggctacagcaccccctgggggtattttgacttcaacagattccactgccacttctcaccacgtgactggcagcgactcatcaacaacaactggggattccggcctaagcgactcaacttcaagctcttcaacattcaggtcaaagaggttacggacaacaatggagtcaagaccatcgccaataaccttaccagcacggtccaggtcttcacggactcagactatcagctcccgtacgtgctcgggtcggctcacgagggctgcctcccgccgttcccagcggacgttttcatgattcctcagtacgggtatctgacgcttaatgatggaagccaggccgtgggtcgttcgtccttttactgcctggaatatttcccgtcgcaaatgctaagaacgggtaacaacttccagttcagctacgagtttgagaacgtacctttccatagcagctacgctcacagccaaagcctggaccgactaatgaatccactcatcgaccaatacttgtactatctctcaaagactattaacggttctggacagaatcaacaaacgctaaaattcagtgtggccggacccagcaacatggctgtccagggaagaaactacatacctggacccagctaccgacaacaacgtgtctcaaccactgtgactcaaaacaacaacagcgaatttgcttggcctggagcttcttcttgggctctcaatggacgtaatagcttgatgaatcctggacctgctatggccagccacaaagaaggagaggaccgtttctttcctttgtctggatctttaatttttggcaaacaaggaactggaagagacaacgtggatgcggacaaagtcatgataaccaacgaagaagaaattaaaactactaacccggtagcaacggagtcctatggacaagtggccacaaaccaccagagtgcccgggcacaggcgcagaccggctgggttcaaaaccaaggaatacttccgggtatggtttggcaggacagagatgtgtacctgcaaggacccatttgggccaaaattcctcacacggacggcaactttcacccttctccgctgatgggagggtttggaatgaagcacccgcctcctcagatcctcatcaaaaacacacctgtacctgcggatcctccaacggccttcaacaagggcaagctgaactctttcatcacccagtattctactggccaagtcagcgtggagatcgagtgggagctgcagaaggaaaacagcaagcgctggaacccggagatccagtacacttccaactattacaagtctaataatgttgaatttgctgttaatactgaaggtgtatatagtgaaccccgccccattggcaccagatacctgactcgtaatctg

SEQ ID NO: 438 - protein, 736 aa, synthetic construct
  REGION 1..736: note = Adeno Associated Virus Capsid Protein Variant
MAADGYLPDWLEDNLSEGIREWWALKPGAPQPKANQQHQDNARGLVLPGYKYLGPGNGLDKGEPVNAADAAALEHDKAYDQQLKAGDNPYLKYNHADAEFQERLKEDTSFGGNLGRAVFQAKKRLLEPLGLVEEAAKTAPGKKRPVEQSPQEPDSSAGRGKSGAQPAKKRLNFGQTGDTESVPDPQPIGEPPAAPSGVGSLTMASGGGAPVADNNEGADGVGSSSGNWHCDSQWLGDRVITTSTRTWALPTYNNHLYKQISNSTSGGSSNDNAYFGYSTPWGYFDFNRFHCHFSPRDWQRLINNNWGFRPKRLNFKLFNIQVKEVTDNNGVKTIANNLTSTVQVFTDSDYQLPYVLGSAHEGCLPPFPADVFMIPQYGYLTLNDGSQAVGRSSFYCLEYFPSQMLRTGNNFQFSYEFENVPFHSSYAHSQSLDRLMNPLIDQYLYYLSKTINGSGQNQQTLKFSVAGPSNMAVQGRNYIPGPSYRQQRVSTTVTQNNNSEFAWPGASSWALNGRNSLMNPGPAMASHKEGEDRFFPLSGSLIFGKQGTGRDNVDADKVMITNEEEIKTTNPVATESYGQVATNHQSARAQAQTGWVQNQGILPGMVWQDRDVYLQGPIWAKIPHTDGNFHPSPLMGGFGMKHPPPQILIKNTPVPADPPTAFNKGKLNSFITQYSTGQVSVEIEWELQKENSKRWNPEIQYTSNYYKSNNVEFAVNTEGVYSEPRPIGTRYLTRNL

SEQ ID NO: 439 - DNA, 2208 bp, synthetic construct
  misc_feature 1..2208: note = Adeno Associated Virus Capsid Protein Variant
  source 1..2208: mol_type = other DNA
atggctgccgatggttatcttccagattggctcgaggacaaccttagtgaaggaattcgcgagtggtgggctttgaaacctggagcccctcaacccaaggcaaatcaacaacatcaagacaacgctcgaggtcttgtgcttccgggttacaaataccttggacccggcaacggactcgacaagggggagccggtcaacgcagcagacgcggcggccctcgagcacgacaaggcctacgaccagcagctcaaggccggagacaacccgtacctcaagtacaaccacgccgacgccgagttccaggagcggctcaaagaagatacgtcttttgggggcaacctcgggcgagcagtcttccaggccaaaaagaggcttcttgaacctcttggtctggttgaggaagcggctaagacggctcctggaaagaagaggcctgtagagcagtctcctcaggaaccggactcctccacgggtattggcaaatcgggtgcacagcccgctaaaaagagactcaatttcggtcagactggcgacacagagtcagtcccagaccctcaaccaatcggagaacctcccgcagccccctcaggtgtgggatctcttacaatggcttcaggtggtggcgcaccagtggcagacaataacgaaggtgccgatggagtgggtagttcctcgggaaattggcattgcgattcccaatggctgggggacagagtcatcaccaccagcacccgaacctgggccctgcccacctacaacaatcacctctacaagcaaatctccaacagcacatctggaggatcttcaaatgacaacgcctacttcggctacagcaccccctgggggtattttgacttcaacagattccactgccacttctcaccacgtgactggcagcgactcatcaacaacaactggggattccggcctaagcgactcaacttcaagctcttcaacattcaggtcaaagaggttacggacaacaatggagtcaagaccatcgccaataaccttaccagcacggtccaggtcttcacggactcagactatcagctcccgtacgtgctcgggtcggctcacgagggctgcctcccgccgttcccagcggacgttttcatgattcctcagtacgggtatctgacgcttaatgatggaagccaggccgtgggtcgttcgtccttttactgcctggaatatttcccgtcgcaaatgctaagaacgggtaacaacttccagttcagctacgagtttgagaacgtacctttccatagcagctacgctcacagccaaagcctggaccgactaatgaatccactcatcgaccaatacttgtactatctctcaaagactattaacggttctggacagaatcaacaaacgctaaaattcagtgtggccggacccagcaacatggctgtccagggaagaaactacatacctggacccagctaccgacaacaacgtgtctcaaccactgtgactcaaaacaacaacagcgaatttgcttggcctggagcttcttcttgggctctcaatggacgtaatagcttgatgaatcctggacctgctatggccagccacaaagaaggagaggaccgtttctttcctttgtctggatctttaatttttggcaaacaaggaactggaagagacaacgtggatgcggacaaagtcatgataaccaacgaagaagaaattaaaactactaacccggtagcaacggagtcctatggacaagtggccacaaaccaccagagtgcccgggcacaggcgcagaccggctgggttcaaaaccaaggaatacttccgggtatggtttggcaggacagagatgtgtacctgcaaggacccatttgggccaaaattcctcacacggacggcaactttcacccttctccgctgatgggagggtttggaatgaagcacccgcctcctcagatcctcatcaaaaacacacctgtacctgcggatcctccaacggccttcaacaagggcaagctgaactctttcatcacccagtattctactggccaagtcagcgtggagatcgagtgggagctgcagaaggaaaacagcaagcgctggaacccggagatccagtacacttccaactattacaagtctaataatgttgaatttgctgttaatactgaaggtgtatatagtgaaccccgccccattggcaccagatacctgactcgtaatctg

SEQ ID NO: 440 - protein, 736 aa, synthetic construct
  REGION 1..736: note = Adeno Associated Virus Capsid Protein Variant
MAADGYLPDWLEDNLSEGIREWWALKPGAPQPKANQQHQDNARGLVLPGYKYLGPGNGLDKGEPVNAADAAALEHDKAYDQQLKAGDNPYLKYNHADAEFQERLKEDTSFGGNLGRAVFQAKKRLLEPLGLVEEAAKTAPGKKRPVEQSPQEPDSSTGIGKSGAQPAKKRLNFGQTGDTESVPDPQPIGEPPAAPSGVGSLTMASGGGAPVADNNEGADGVGSSSGNWHCDSQWLGDRVITTSTRTWALPTYNNHLYKQISNSTSGGSSNDNAYFGYSTPWGYFDFNRFHCHFSPRDWQRLINNNWGFRPKRLNFKLFNIQVKEVTDNNGVKTIANNLTSTVQVFTDSDYQLPYVLGSAHEGCLPPFPADVFMIPQYGYLTLNDGSQAVGRSSFYCLEYFPSQMLRTGNNFQFSYEFENVPFHSSYAHSQSLDRLMNPLIDQYLYYLSKTINGSGQNQQTLKFSVAGPSNMAVQGRNYIPGPSYRQQRVSTTVTQNNNSEFAWPGASSWALNGRNSLMNPGPAMASHKEGEDRFFPLSGSLIFGKQGTGRDNVDADKVMITNEEEIKTTNPVATESYGQVATNHQSARAQAQTGWVQNQGILPGMVWQDRDVYLQGPIWAKIPHTDGNFHPSPLMGGFGMKHPPPQILIKNTPVPADPPTAFNKGKLNSFITQYSTGQVSVEIEWELQKENSKRWNPEIQYTSNYYKSNNVEFAVNTEGVYSEPRPIGTRYLTRNL

SEQ ID NO: 441 - DNA, 2208 bp, synthetic construct
  misc_feature 1..2208: note = Adeno Associated Virus Capsid Protein Variant
  source 1..2208: mol_type = other DNA
atggctgccgatggttatcttccagattggctcgaggacaaccttagtgaaggaattcgcgagtggtgggctttgaaacctggagcccctcaacccaaggcaaatcaacaacatcaagacaacgctcgaggtcttgtgcttccgggttacaaataccttggacccggcaacggactcgacaagggggagccggtcaacgcagcagacgcggcggccctcgagcacgacaaggcctacgaccagcagctcaaggccggagacaacccgtacctcaagtacaaccacgccgacgccgagttccaggagcggctcaaagaagatacgtcttttgggggcaacctcgggcgagcagtcttccaggccaaaaagaggcttcttgaacctcttggtctggttgaggaagcggctaagacggctcctggaaagaagaggcctgtagagcagtctcctcagcagccggactcctccgcgggtattggcaaatcgggtgcacagcccgctaaaaagagactcaatttcggtcagactggcgacacagagtcagtcccagaccctcaaccaatcggagaacctcccgcagccccctcaggtgtgggatctcttacaatggcttcaggtggtggcgcaccagtggcagacaataacgaaggtgccgatggagtgggtagttcctcgggaaattggcattgcgattcccaatggctgggggacagagtcatcaccaccagcacccgaacctgggccctgcccacctacaacaatcacctctacaagcaaatctccaacagcacatctggaggatcttcaaatgacaacgcctacttcggctacagcaccccctgggggtattttgacttcaacagattccactgccacttctcaccacgtgactggcagcgactcatcaacaacaactggggattccggcctaagcgactcaacttcaagctcttcaacattcaggtcaaagaggttacggacaacaatggagtcaagaccatcgccaataaccttaccagcacggtccaggtcttcacggactcagactatcagctcccgtacgtgctcgggtcggctcacgagggctgcctcccgccgttcccagcggacgttttcatgattcctcagtacgggtatctgacgcttaatgatggaagccaggccgtgggtcgttcgtccttttactgcctggaatatttcccgtcgcaaatgctaagaacgggtaacaacttccagttcagctacgagtttgagaacgtacctttccatagcagctacgctcacagccaaagcctggaccgactaatgaatccactcatcgaccaatacttgtactatctctcaaagactattaacggttctggacagaatcaacaaacgctaaaattcagtgtggccggacccagcaacatggctgtccagggaagaaactacatacctggacccagctaccgacaacaacgtgtctcaaccactgtgactcaaaacaacaacagcgaatttgcttggcctggagcttcttcttgggctctcaatggacgtaatagcttgatgaatcctggacctgctatggccagccacaaagaaggagaggaccgtttctttcctttgtctggatctttaatttttggcaaacaaggaactggaagagacaacgtggatgcggacaaagtcatgataaccaacgaagaagaaattaaaactactaacccggtagcaacggagtcctatggacaagtggccacaaaccaccagagtgcccgggcacaggcgcagaccggctgggttcaaaaccaaggaatacttccgggtatggtttggcaggacagagatgtgtacctgcaaggacccatttgggccaaaattcctcacacggacggcaactttcacccttctccgctgatgggagggtttggaatgaagcacccgcctcctcagatcctcatcaaaaacacacctgtacctgcggatcctccaacggccttcaacaagggcaagctgaactctttcatcacccagtattctactggccaagtcagcgtggagatcgagtgggagctgcagaaggaaaacagcaagcgctggaacccggagatccagtacacttccaactattacaagtctaataatgttgaatttgctgttaatactgaaggtgtatatagtgaaccccgccccattggcaccagatacctgactcgtaatctg

SEQ ID NO: 442 - protein, 736 aa, synthetic construct
  REGION 1..736: note = Adeno Associated Virus Capsid Protein Variant
MAADGYLPDWLEDNLSEGIREWWALKPGAPQPKANQQHQDNARGLVLPGYKYLGPGNGLDKGEPVNAADAAALEHDKAYDQQLKAGDNPYLKYNHADAEFQERLKEDTSFGGNLGRAVFQAKKRLLEPLGLVEEAAKTAPGKKRPVEQSPQQPDSSAGIGKSGAQPAKKRLNFGQTGDTESVPDPQPIGEPPAAPSGVGSLTMASGGGAPVADNNEGADGVGSSSGNWHCDSQWLGDRVITTSTRTWALPTYNNHLYKQISNSTSGGSSNDNAYFGYSTPWGYFDFNRFHCHFSPRDWQRLINNNWGFRPKRLNFKLFNIQVKEVTDNNGVKTIANNLTSTVQVFTDSDYQLPYVLGSAHEGCLPPFPADVFMIPQYGYLTLNDGSQAVGRSSFYCLEYFPSQMLRTGNNFQFSYEFENVPFHSSYAHSQSLDRLMNPLIDQYLYYLSKTINGSGQNQQTLKFSVAGPSNMAVQGRNYIPGPSYRQQRVSTTVTQNNNSEFAWPGASSWALNGRNSLMNPGPAMASHKEGEDRFFPLSGSLIFGKQGTGRDNVDADKVMITNEEEIKTTNPVATESYGQVATNHQSARAQAQTGWVQNQGILPGMVWQDRDVYLQGPIWAKIPHTDGNFHPSPLMGGFGMKHPPPQILIKNTPVPADPPTAFNKGKLNSFITQYSTGQVSVEIEWELQKENSKRWNPEIQYTSNYYKSNNVEFAVNTEGVYSEPRPIGTRYLTRNL

SEQ ID NO: 443 - DNA, 2208 bp, synthetic construct
  misc_feature 1..2208: note = Adeno Associated Virus Capsid Protein Variant
  source 1..2208: mol_type = other DNA
atggctgccgatggttatcttccagattggctcgaggacaaccttagtgaaggaattcgcgagtggtgggctttgaaacctggagcccctcaacccaaggcaaatcaacaacatcaagacaacgctcgaggtcttgtgcttccgggttacaaataccttggacccggcaacggactcgacaagggggagccggtcaacgcagcagacgcggcggccctcgagcacgacaaggcctacgaccagcagctcaaggccggagacaacccgtacctcaagtacaaccacgccgacgccgagttccaggagcggctcaaagaagatacgtcttttgggggcaacctcgggcgagcagtcttccaggccaaaaagaggcttcttgaacctcttggtctggttgaggaagcggctaagacggctcctggaaagaagaggcctgtagagcagtctcctcaggaaccggactcctccgcgggtattggcaaatcgggtgcacagcccgctaaaaagagactcaatttcggtcagactggcgacacagagtcagtcccagaccctcaaccaatcggagaacctcccgcagccccctcaggtgtgggatctcttacaatggcttcaggtggtggcgcaccagtggcagacaataacgaaggtgccgatggagtgggtagttcctcgggaaattggcattgcgattcccaatggctgggggacagagtcatcaccaccagcacccgaacctgggccctgcccacctacaacaatcacctctacaagcaaatctccaacagcacatctggaggatcttcaaatgacaacgcctacttcggctacagcaccccctgggggtattttgacttcaacagattccactgccacttctcaccacgtgactggcagcgactcatcaacaacaactggggattccggcctaagcgactcaacttcaagctcttcaacattcaggtcaaagaggttacggacaacaatggagtcaagaccatcgccaataaccttaccagcacggtccaggtcttcacggactcagactatcagctcccgtacgtgctcgggtcggctcacgagggctgcctcccgccgttcccagcggacgttttcatgattcctcagtacgggtatctgacgcttaatgatggaagccaggccgtgggtcgttcgtccttttactgcctggaatatttcccgtcgcaaatgctaagaacgggtaacaacttccagttcagctacgagtttgagaacgtacctttccatagcagctacgctcacagccaaagcctggaccgactaatgaatccactcatcgaccaatacttgtactatctctcaaagactattaacggttctggacagaatcaacaaacgctaaaattcagtgtggccggacccagcaacatggctgtccagggaagaaactacatacctggacccagctacgggcaacaacgtgtctcaaccactgtgactcaaaacaacaacagcgaatttgcttggcctggagcttcttcttgggctctcaatggacgtaatagcttgatgaatcctggacctgctatggccagccacaaagaaggagaggaccgtttctttcctttgtctggatctttaatttttggcaaacaaggaactggaagagacaacgtggatgcggacaaagtcatgataaccaacgaagaagaaattaaaactactaacccggtagcaacggagtcctatggacaagtggccacaaaccaccagagtgcccgggcacaggcgcagaccggctgggttcaaaaccaaggaatacttccgggtatggtttggcaggacagagatgtgtacctgcaaggacccatttgggccaaaattcctcacacggacggcaactttcacccttctccgctgatgggagggtttggaatgaagcacccgcctcctcagatcctcatcaaaaacacacctgtacctgcggatcctccaacggccttcaacaagggcaagctgaactctttcatcacccagtattctactggccaagtcagcgtggagatcgagtgggagctgcagaaggaaaacagcaagcgctggaacccggagatccagtacacttccaactattacaagtctaataatgttgaatttgctgttaatactgaaggtgtatatagtgaaccccgccccattggcaccagatacctgactcgtaatctg

SEQ ID NO: 444 - protein, 736 aa, synthetic construct
  REGION 1..736: note = Adeno Associated Virus Capsid Protein Variant
MAADGYLPDWLEDNLSEGIREWWALKPGAPQPKANQQHQDNARGLVLPGYKYLGPGNGLDKGEPVNAADAAALEHDKAYDQQLKAGDNPYLKYNHADAEFQERLKEDTSFGGNLGRAVFQAKKRLLEPLGLVEEAAKTAPGKKRPVEQSPQEPDSSAGIGKSGAQPAKKRLNFGQTGDTESVPDPQPIGEPPAAPSGVGSLTMASGGGAPVADNNEGADGVGSSSGNWHCDSQWLGDRVITTSTRTWALPTYNNHLYKQISNSTSGGSSNDNAYFGYSTPWGYFDFNRFHCHFSPRDWQRLINNNWGFRPKRLNFKLFNIQVKEVTDNNGVKTIANNLTSTVQVFTDSDYQLPYVLGSAHEGCLPPFPADVFMIPQYGYLTLNDGSQAVGRSSFYCLEYFPSQMLRTGNNFQFSYEFENVPFHSSYAHSQSLDRLMNPLIDQYLYYLSKTINGSGQNQQTLKFSVAGPSNMAVQGRNYIPGPSYGQQRVSTTVTQNNNSEFAWPGASSWALNGRNSLMNPGPAMASHKEGEDRFFPLSGSLIFGKQGTGRDNVDADKVMITNEEEIKTTNPVATESYGQVATNHQSARAQAQTGWVQNQGILPGMVWQDRDVYLQGPIWAKIPHTDGNFHPSPLMGGFGMKHPPPQILIKNTPVPADPPTAFNKGKLNSFITQYSTGQVSVEIEWELQKENSKRWNPEIQYTSNYYKSNNVEFAVNTEGVYSEPRPIGTRYLTRNL

SEQ ID NO: 445 - DNA, 2208 bp, synthetic construct
  misc_feature 1..2208: note = Adeno Associated Virus Capsid Protein Variant
  source 1..2208: mol_type = other DNA
atggctgccgatggttatcttccagattggctcgaggacaaccttagtgaaggaattcgcgagtggtgggctttgaaacctggagcccctcaacccaaggcaaatcaacaacatcaagacaacgctcgaggtcttgtgcttccgggttacaaataccttggacccggcaacggactcgacaagggggagccggtcaacgcagcagacgcggcggccctcgagcacgacaaggcctacgaccagcagctcaaggccggagacaacccgtacctcaagtacaaccacgccgacgccgagttccaggagcggctcaaagaagatacgtcttttgggggcaacctcgggcgagcagtcttccaggccaaaaagaggcttcttgaacctcttggtctggttgaggaagcggctaagacggctcctggaaagaagaggcctgtagagcagtctcctcaggaaccggactcctccgcgggtattggcaaatcgggtgcacagcccgctaaaaagagactcaatttcggtcagactggcgacacagagtcagtcccagaccctcaaccaatcggagaacctcccgcagccccctcaggtgtgggatctcttacaatggcttcaggtggtggcgcaccagtggcagacaataacgaaggtgccgatggagtgggtagttcctcgggaaattggcattgcgattcccaatggctgggggacagagtcatcaccaccagcacccgaacctgggccctgcccacctacaacaatcacctctacaagcaaatctccaacagcacatctggaggatcttcaaatgacaacgcctacttcggctacagcaccccctgggggtattttgacttcaacagattccactgccacttctcaccacgtgactggcagcgactcatcaacaacaactggggattccggcctaagcgactcaacttcaagctcttcaacattcaggtcaaagaggttacggacaacaatggagtcaagaccatcgccaataaccttaccagcacggtccaggtcttcacggactcagactatcagctcccgtacgtgctcgggtcggctcacgagggctgcctcccgccgttcccagcggacgttttcatgattcctcagtacgggtatctgacgcttaatgatggaagccaggccgtgggtcgttcgtccttttactgcctggaatatttcccgtcgcaaatgctaagaacgggtaacaacttccagttcagctacgagtttgagaacgtagggttccatagcagctacgctcacagccaaagcctggaccgactaatgaatccactcatcgaccaatacttgtactatctctcaaagactattaacggttctggacagaatcaacaaacgctaaaattcagtgtggccggacccagcaacatggctgtccagggaagaaactacatacctggacccagctaccgacaacaacgtgtctcaaccactgtgactcaaaacaacaacagcgaatttgcttggcctggagcttcttcttgggctctcaatggacgtaatagcttgatgaatcctggacctgctatggccagccacaaagaaggagaggaccgtttctttcctttgtctggatctttaatttttggcaaacaaggaactggaagagacaacgtggatgcggacaaagtcatgataaccaacgaagaagaaattaaaactactaacccggtagcaacggagtcctatggacaagtggccacaaaccaccagagtgcccgggcacaggcgcagaccggctgggttcaaaaccaaggaatacttccgggtatggtttggcaggacagagatgtgtacctgcaaggacccatttgggccaaaattcctcacacggacggcaactttcacccttctccgctgatgggagggtttggaatgaagcacccgcctcctcagatcctcatcaaaaacacacctgtacctgcggatcctccaacggccttcaacaagggcaagctgaactctttcatcacccagtattctactggccaagtcagcgtggagatcgagtgggagctgcagaaggaaaacagcaagcgctggaacccggagatccagtacacttccaactattacaagtctaataatgttgaatttgctgttaatactgaaggtgtatatagtgaaccccgccccattggcaccagatacctgactcgtaatctg

SEQ ID NO: 446 - protein, 736 aa, synthetic construct
  REGION 1..736: note = Adeno Associated Virus Capsid Protein Variant
MAADGYLPDWLEDNLSEGIREWWALKPGAPQPKANQQHQDNARGLVLPGYKYLGPGNGLDKGEPVNAADAAALEHDKAYDQQLKAGDNPYLKYNHADAEFQERLKEDTSFGGNLGRAVFQAKKRLLEPLGLVEEAAKTAPGKKRPVEQSPQEPDSSAGIGKSGAQPAKKRLNFGQTGDTESVPDPQPIGEPPAAPSGVGSLTMASGGGAPVADNNEGADGVGSSSGNWHCDSQWLGDRVITTSTRTWALPTYNNHLYKQISNSTSGGSSNDNAYFGYSTPWGYFDFNRFHCHFSPRDWQRLINNNWGFRPKRLNFKLFNIQVKEVTDNNGVKTIANNLTSTVQVFTDSDYQLPYVLGSAHEGCLPPFPADVFMIPQYGYLTLNDGSQAVGRSSFYCLEYFPSQMLRTGNNFQFSYEFENVGFHSSYAHSQSLDRLMNPLIDQYLYYLSKTINGSGQNQQTLKFSVAGPSNMAVQGRNYIPGPSYRQQRVSTTVTQNNNSEFAWPGASSWALNGRNSLMNPGPAMASHKEGEDRFFPLSGSLIFGKQGTGRDNVDADKVMITNEEEIKTTNPVATESYGQVATNHQSARAQAQTGWVQNQGILPGMVWQDRDVYLQGPIWAKIPHTDGNFHPSPLMGGFGMKHPPPQILIKNTPVPADPPTAFNKGKLNSFITQYSTGQVSVEIEWELQKENSKRWNPEIQYTSNYYKSNNVEFAVNTEGVYSEPRPIGTRYLTRNL

SEQ ID NO: 447 - DNA, 2208 bp, synthetic construct
  misc_feature 1..2208: note = Adeno Associated Virus Capsid Protein Variant
  source 1..2208: mol_type = other DNA
atggctgccgatggttatcttccagattggctcgaggacaaccttagtgaaggaattcgcgagtggtgggctttgaaacctggagcccctcaacccaaggcaaatcaacaacatcaagacaacgctcgaggtcttgtgcttccgggttacaaataccttggacccggcaacggactcgacaagggggagccggtcaacgcagcagacgcggcggccctcgagcacgacaaggcctacgaccagcagctcaaggccggagacaacccgtacctcaagtacaaccacgccgacgccgagttccaggagcggctcaaagaagatacgtcttttgggggcaacctcgggcgagcagtcttccaggccaaaaagaggcttcttgaacctcttggtctggttgaggaagcggctaagacggctcctggaaagaagaggcctgtagagcagtctcctcaggaaccggactcctccgcgggtattggcaaatcgggtgcacagcccgctaaaaagagactcaatttcggtcagactggcgacacagagtcagtcccagaccctcaaccaatcggagaacctcccgcagccccctcaggtgtgggatctcttacaatggcttcaggtggtggcgcaccagtggcagacaataacgaaggtgccgatggagtgggtagttcctcgggaaattggcattgcgattcccaatggctgggggacagagtcatcaccaccagcacccgaacctgggccctgcccacctacaacaatcacctctacaagcaaatctccaacagcacatctggaggatcttcaaatgacaacgcctacttcggctacagcaccccctgggggtattttgacttcaacagattccactgccacttctcaccacgtgactggcagcgactcatcaacaacaactggggattccggcctaagcgactcaacttcaagctcttcaacattcaggtcaaagaggttacggacaacaatggagtcaagaccatcgccaataaccttaccagcacggtccaggtcttcacggactcagactatcagctcccgtacgtgctcgggtcggctcacgagggctgcctcccgccgttcccagcggacgttttcatgattcctcagtacgggtatctgacgcttaatgatggaagccaggccgtgggtcagtcgtccttttactgcctggaatatttcccgtcgcaaatgctaagaacgggtaacaacttccagttcagctacgagtttgagaacgtacctttccatagcagctacgctcacagccaaagcctggaccgactaatgaatccactcatcgaccaatacttgtactatctctcaaagactattaacggttctggacagaatcaacaaacgctaaaattcagtgtggccggacccagcaacatggctgtccagggaagaaactacatacctggacccagctaccgacaacaacgtgtctcaaccactgtgactcaaaacaacaacagcgaatttgcttggcctggagcttcttcttgggctctcaatggacgtaatagcttgatgaatcctggacctgctatggccagccacaaagaaggagaggaccgtttctttcctttgtctggatctttaatttttggcaaacaaggaactggaagagacaacgtggatgcggacaaagtcatgataaccaacgaagaagaaattaaaactactaacccggtagcaacggagtcctatggacaagtggccacaaaccaccagagtgcccgggcacaggcgcagaccggctgggttcaaaaccaaggaatacttccgggtatggtttggcaggacagagatgtgtacctgcaaggacccatttgggccaaaattcctcacacggacggcaactttcacccttctccgctgatgggagggtttggaatgaagcacccgcctcctcagatcctcatcaaaaacacacctgtacctgcggatcctccaacggccttcaacaagggcaagctgaactctttcatcacccagtattctactggccaagtcagcgtggagatcgagtgggagctgcagaaggaaaacagcaagcgctggaacccggagatccagtacacttccaactattacaagtctaataatgttgaatttgctgttaatactgaaggtgtatatagtgaaccccgccccattggcaccagatacctgactcgtaatctg

SEQ ID NO: 448 - protein, 736 aa, synthetic construct
  REGION 1..736: note = Adeno Associated Virus Capsid Protein Variant
MAADGYLPDWLEDNLSEGIREWWALKPGAPQPKANQQHQDNARGLVLPGYKYLGPGNGLDKGEPVNAADAAALEHDKAYDQQLKAGDNPYLKYNHADAEFQERLKEDTSFGGNLGRAVFQAKKRLLEPLGLVEEAAKTAPGKKRPVEQSPQEPDSSAGIGKSGAQPAKKRLNFGQTGDTESVPDPQPIGEPPAAPSGVGSLTMASGGGAPVADNNEGADGVGSSSGNWHCDSQWLGDRVITTSTRTWALPTYNNHLYKQISNSTSGGSSNDNAYFGYSTPWGYFDFNRFHCHFSPRDWQRLINNNWGFRPKRLNFKLFNIQVKEVTDNNGVKTIANNLTSTVQVFTDSDYQLPYVLGSAHEGCLPPFPADVFMIPQYGYLTLNDGSQAVGQSSFYCLEYFPSQMLRTGNNFQFSYEFENVPFHSSYAHSQSLDRLMNPLIDQYLYYLSKTINGSGQNQQTLKFSVAGPSNMAVQGRNYIPGPSYRQQRVSTTVTQNNNSEFAWPGASSWALNGRNSLMNPGPAMASHKEGEDRFFPLSGSLIFGKQGTGRDNVDADKVMITNEEEIKTTNPVATESYGQVATNHQSARAQAQTGWVQNQGILPGMVWQDRDVYLQGPIWAKIPHTDGNFHPSPLMGGFGMKHPPPQILIKNTPVPADPPTAFNKGKLNSFITQYSTGQVSVEIEWELQKENSKRWNPEIQYTSNYYKSNNVEFAVNTEGVYSEPRPIGTRYLTRNL

SEQ ID NO: 449 - DNA, 2208 bp, synthetic construct
  misc_feature 1..2208: note = Adeno Associated Virus Capsid Protein Variant
  source 1..2208: mol_type = other DNA
atggctgccgatggttatcttccagattggctcgaggacaaccttagtgaaggaattcgcgagtggtgggctttgaaacctggagcccctcaacccaaggcaaatcaacaacatcaagacaacgctcgaggtcttgtgcttccgggttacaaataccttggacccggcaacggactcgacaagggggagccggtcaacgcagcagacgcggcggccctcgagcacgacaaggcctacgaccagcagctcaaggccggagacaacccgtacctcaagtacaaccacgccgacgccgagttccaggagcggctcaaagaagatacgtcttttgggggcaacctcgggcgagcagtcttccaggccaaaaagaggcttcttgaacctcttggtctggttgaggaagcggctaagacggctcctggaaagaagaggcctgtagagcagtctcctcaggaaccggactcctccgcgggtattggcaaatcgggtgcacagcccgctaaaaagagactcaatttcggtcagactggcgacacagagtcagtcccagaccctcaaccaatcggagaacctcccgcagccccctcaggtgtgggatctcttacaatggcttcaggtggtggcgcaccagtggcagacaataacgaaggtgccgatggagtgggtagttcctcgggaaattggcattgcgattcccaatggctgggggacagagtcatcaccaccagcacccgaacctgggccctgcccacctacaacaatcacctctacaagcaaatctccaacagcacatctggaggatcttcaaatgacaacgcctacttcggctacagcaccccctgggggtattttgacttcaacagattccactgccacttctcaccacgtgactggcagcgactcatcaacaacaactggggattccggcctaagcgactcaacttcaagctcttcaacattcaggtcaaagaggttacggacaacaatggagtcaagaccatcgccaataaccttaccagcacggtccaggtcttcacggactcagactatcagctcccgtacgtgctcgggtcggctcacgagggctgcctcccgccgttcccagcggacgttttcatgattcctcagtacgggtatctgacgcttaatgatggaagccaggccgtgggtcgttcgtccttttactgcctggaatatttcccgtcgcaaatgctaagaacgggtaacaacttccagttcagctacgagtttgagaacgtacctttccatagcagctacgctcacagccaaagcctggaccgactaatgaatccactcatcgaccaatacttgtactatctctcaaagactattaacggttctggacagaatcaacaaacgctaaaattcagtgtggccggaccctggaacatggctgtccagggaagaaactacatacctggacccagctaccgacaacaacgtgtctcaaccactgtgactcaaaacaacaacagcgaatttgcttggcctggagcttcttcttgggctctcaatggacgtaatagcttgatgaatcctggacctgctatggccagccacaaagaaggagaggaccgtttctttcctttgtctggatctttaatttttggcaaacaaggaactggaagagacaacgtggatgcggacaaagtcatgataaccaacgaagaagaaattaaaactactaacccggtagcaacggagtcctatggacaagtggccacaaaccaccagagtgcccgggcacaggcgcagaccggctgggttcaaaaccaaggaatacttccgggtatggtttggcaggacagagatgtgtacctgcaaggacccatttgggccaaaattcctcacacggacggcaactttcacccttctccgctgatgggagggtttggaatgaagcacccgcctcctcagatcctcatcaaaaacacacctgtacctgcggatcctccaacggccttcaacaagggcaagctgaactctttcatcacccagtattctactggccaagtcagcgtggagatcgagtgggagctgcagaaggaaaacagcaagcgctggaacccggagatccagtacacttccaactattacaagtctaataatgttgaatttgctgttaatactgaaggtgtatatagtgaaccccgccccattggcaccagatacctgactcgtaatctg

SEQ ID NO: 450 - protein, 736 aa, synthetic construct
  REGION 1..736: note = Adeno Associated Virus Capsid Protein Variant
MAADGYLPDWLEDNLSEGIREWWALKPGAPQPKANQQHQDNARGLVLPGYKYLGPGNGLDKGEPVNAADAAALEHDKAYDQQLKAGDNPYLKYNHADAEFQERLKEDTSFGGNLGRAVFQAKKRLLEPLGLVEEAAKTAPGKKRPVEQSPQEPDSSAGIGKSGAQPAKKRLNFGQTGDTESVPDPQPIGEPPAAPSGVGSLTMASGGGAPVADNNEGADGVGSSSGNWHCDSQWLGDRVITTSTRTWALPTYNNHLYKQISNSTSGGSSNDNAYFGYSTPWGYFDFNRFHCHFSPRDWQRLINNNWGFRPKRLNFKLFNIQVKEVTDNNGVKTIANNLTSTVQVFTDSDYQLPYVLGSAHEGCLPPFPADVFMIPQYGYLTLNDGSQAVGRSSFYCLEYFPSQMLRTGNNFQFSYEFENVPFHSSYAHSQSLDRLMNPLIDQYLYYLSKTINGSGQNQQTLKFSVAGPWNMAVQGRNYIPGPSYRQQRVSTTVTQNNNSEFAWPGASSWALNGRNSLMNPGPAMASHKEGEDRFFPLSGSLIFGKQGTGRDNVDADKVMITNEEEIKTTNPVATESYGQVATNHQSARAQAQTGWVQNQGILPGMVWQDRDVYLQGPIWAKIPHTDGNFHPSPLMGGFGMKHPPPQILIKNTPVPADPPTAFNKGKLNSFITQYSTGQVSVEIEWELQKENSKRWNPEIQYTSNYYKSNNVEFAVNTEGVYSEPRPIGTRYLTRNL

SEQ ID NO: 451 - DNA, 2208 bp, synthetic construct
  misc_feature 1..2208: note = Adeno Associated Virus Capsid Protein Variant
  source 1..2208: mol_type = other DNA
atggctgccgatggttatcttccagattggctcgaggacaaccttagtgaaggaattcgcgagtggtgggctttgaaacctggagcccctcaacccaaggcaaatcaacaacatcaagacaacgctcgaggtcttgtgcttccgggttacaaataccttggacccggcaacggactcgacaagggggagccggtcaacgcagcagacgcggcggccctcgagcacgacaaggcctacgaccagcagctcaaggccggagacaacccgtacctcaagtacaaccacgccgacgccgagttccaggagcggctcaaagaagatacgtcttttgggggcaacctcgggcgagcagtcttccaggccaaaaagaggcttcttgaacctcttggtctggttgaggaagcggctaagacggctcctggaaagaagaggcctgtagagcagtctcctcaggaaccggactcctccgcgggtattggcaaatcgggtgcacagcccgctaaaaagagactcaatttcggtcagactggcgacacagagtcagtcccagaccctcaaccaatcggagaacctcccgcagccccctcaggtgtgggatctcttacaatggcttcaggtggtggcgcaccagtggcagacaataacgaaggtgccgatggagtgggtagttcctcgggaaattggcattgcgattcccaatggctgggggacagagtcatcaccaccagcacccgaacctgggccctgcccacctacaacaatcacctctacaagcaaatctccaacagcacatctggaggatcttcaaatgacaacgcctacttcggctacagcaccccctgggggtattttgacttcaacagattccactgccacttctcaccacgtgactggcagcgactcatcaacaacaactggggattccggcctaagcgactcaacttcaagctcttcaacattcaggtcaaagaggttacggacaacaatggagtcaagaccatcgccaataaccttaccagcacggtccaggtcttcacggactcagactatcagctcccgtacgtgctcgggtcggctcacgagggctgcctcccgccgttcccagcggacgttttcatgattcctcagtacgggtatctgacgcttaatgatggaagccaggccgtgggtcgttcgtccttttactgcctggaatatttcccgtcgcaaatgctaagaacgggtaacaacttccagttcagctacgagtttgagaacgtacctttccatagcagctacgctcacagccaaagcctggaccgactaatgaatccactcatcgaccaatacttgtactatctctcaaagactattaacggttctggacagaatcaacaaacgctaaaattcagtgtggccggacccagcaacatggctgtccagggaagaaactacatacctggacccagctaccgacaacaacgtgtctcaaccactgtgactcaaaacaacaacagcgaatttgcttggcctggagcttcttcttgggctctcaatggacgtaatagcttgatgaatcctggacctgctatggccagccacaaagaaggagaggaccgtttctttcctttgtctggatctttaatttttggcaaacaaggaactggaagagacaacgtggatgcggacaaagtcatgataaccaacgaagaagaaattaaaactactaacccggtagcaacggagtcctatggacaagtggccacaaaccaccagagtgcccgggcacaggcgcagaccggctgggttcaaaaccaaggaatacttccgggtatggtttggcaggacagagatgtgtacctgcaaggacccatttgggccaaaattcctcacacggacggccagtttcacccttctccgctgatgggagggtttggaatgaagcacccgcctcctcagatcctcatcaaaaacacacctgtacctgcggatcctccaacggccttcaacaagggcaagctgaactctttcatcacccagtattctactggccaagtcagcgtggagatcgagtgggagctgcagaaggaaaacagcaagcgctggaacccggagatccagtacacttccaactattacaagtctaataatgttgaatttgctgttaatactgaaggtgtatatagtgaaccccgccccattggcaccagatacctgactcgtaatctg

SEQ ID NO: 452 - protein, 736 aa, synthetic construct
  REGION 1..736: note = Adeno Associated Virus Capsid Protein Variant
MAADGYLPDWLEDNLSEGIREWWALKPGAPQPKANQQHQDNARGLVLPGYKYLGPGNGLDKGEPVNAADAAALEHDKAYDQQLKAGDNPYLKYNHADAEFQERLKEDTSFGGNLGRAVFQAKKRLLEPLGLVEEAAKTAPGKKRPVEQSPQEPDSSAGIGKSGAQPAKKRLNFGQTGDTESVPDPQPIGEPPAAPSGVGSLTMASGGGAPVADNNEGADGVGSSSGNWHCDSQWLGDRVITTSTRTWALPTYNNHLYKQISNSTSGGSSNDNAYFGYSTPWGYFDFNRFHCHFSPRDWQRLINNNWGFRPKRLNFKLFNIQVKEVTDNNGVKTIANNLTSTVQVFTDSDYQLPYVLGSAHEGCLPPFPADVFMIPQYGYLTLNDGSQAVGRSSFYCLEYFPSQMLRTGNNFQFSYEFENVPFHSSYAHSQSLDRLMNPLIDQYLYYLSKTINGSGQNQQTLKFSVAGPSNMAVQGRNYIPGPSYRQQRVSTTVTQNNNSEFAWPGASSWALNGRNSLMNPGPAMASHKEGEDRFFPLSGSLIFGKQGTGRDNVDADKVMITNEEEIKTTNPVATESYGQVATNHQSARAQAQTGWVQNQGILPGMVWQDRDVYLQGPIWAKIPHTDGQFHPSPLMGGFGMKHPPPQILIKNTPVPADPPTAFNKGKLNSFITQYSTGQVSVEIEWELQKENSKRWNPEIQYTSNYYKSNNVEFAVNTEGVYSEPRPIGTRYLTRNL

SEQ ID NO: 453 - DNA, 2208 bp, synthetic construct
  misc_feature 1..2208: note = Adeno Associated Virus Capsid Protein Variant
  source 1..2208: mol_type = other DNA
atggctgccgatggttatcttccagattggctcgaggacaaccttagtgaaggaattcgcgagtggtgggctttgaaacctggagcccctcaacccaaggcaaatcaacaacatcaagacaacgctcgaggtcttgtgcttccgggttacaaataccttggacccggcaacggactcgacaagggggagccggtcaacgcagcagacgcggcggccctcgagcacgacaaggcctacgaccagcagctcaaggccggagacaacccgtacctcaagtacaaccacgccgacgccgagttccaggagcggctcaaagaagatacgtcttttgggggcaacctcgggcgagcagtcttccaggccaaaaagaggcttcttgaacctcttggtctggttgaggaagcggctaagacggctcctggaaagaagaggcctgtagagcagtctcctcaggaaccggactcctccgcgggtattggcaaatcgggtgcacagcccgctaaaaagagactcaatttcggtcagactggcgacacagagtcagtcccagaccctcaaccaatcggagaacctcccgcagccccctcaggtgtgggatctcttacaatggcttcaggtggtggcgcaccagtggcagacaataacgaaggtgccgatggagtgggtagttcctcgggaaattggcattgcgattcccaatggctgggggacagagtcatcaccaccagcacccgaacctgggccctgcccacctacaacaatcacctctacaagcaaatctccaacagcacatctggaggatcttcaaatgacaacgcctacttcggctacagcaccccctgggggtattttgacttcaacagattccactgccacttctcaccacgtgactggcagcgactcatcaacaacaactggggattccggcctaagcgactcaacttcaagctcttcaacattcaggtcaaagaggttacggacaacaatggagtcaagaccatcgccaataaccttaccagcacggtccaggtcttcacggactcagactatcagctcccgtacgtgctcgggtcggctcacgagggctgcctcccgccgttcccagcggacgttttcatgattcctcagtacgggtatctgacgcttaatgatggaagccaggccgtgggtcgttcgtccttttactgcctggaatatttcccgtcgcaaatgctaagaacgggtaacaacttccagttcagctacgagtttgagaacgtacctttccatagcagctacgctcacagccaaagcctggaccgactaatgaatccactcatcgaccaatacttgtactatctctcaaagactattaacggttctggacagaatcaacaaacgtggaaattcagtgtggccggacccagcaacatggctgtccagggaagaaactacatacctggacccagctaccgacaacaacgtgtctcaaccactgtgactcaaaacaacaacagcgaatttgcttggcctggagcttcttcttgggctctcaatggacgtaatagcttgatgaatcctggacctgctatggccagccacaaagaaggagaggaccgtttctttcctttgtctggatctttaatttttggcaaacaaggaactggaagagacaacgtggatgcggacaaagtcatgataaccaacgaagaagaaattaaaactactaacccggtagcaacggagtcctatggacaagtggccacaaaccaccagagtgcccgggcacaggcgcagaccggctgggttcaaaaccaaggaatacttccgggtatggtttggcaggacagagatgtgtacctgcaaggacccatttgggccaaaattcctcacacggacggcaactttcacccttctccgctgatgggagggtttggaatgaagcacccgcctcctcagatcctcatcaaaaacacacctgtacctgcggatcctccaacggccttcaacaagggcaagctgaactctttcatcacccagtattctactggccaagtcagcgtggagatcgagtgggagctgcagaaggaaaacagcaagcgctggaacccggagatccagtacacttccaactattacaagtctaataatgttgaatttgctgttaatactgaaggtgtatatagtgaaccccgccccattggcaccagatacctgactcgtaatctg

SEQ ID NO: 454 - protein, 736 aa, synthetic construct
  REGION 1..736: note = Adeno Associated Virus Capsid Protein Variant
MAADGYLPDWLEDNLSEGIREWWALKPGAPQPKANQQHQDNARGLVLPGYKYLGPGNGLDKGEPVNAADAAALEHDKAYDQQLKAGDNPYLKYNHADAEFQERLKEDTSFGGNLGRAVFQAKKRLLEPLGLVEEAAKTAPGKKRPVEQSPQEPDSSAGIGKSGAQPAKKRLNFGQTGDTESVPDPQPIGEPPAAPSGVGSLTMASGGGAPVADNNEGADGVGSSSGNWHCDSQWLGDRVITTSTRTWALPTYNNHLYKQISNSTSGGSSNDNAYFGYSTPWGYFDFNRFHCHFSPRDWQRLINNNWGFRPKRLNFKLFNIQVKEVTDNNGVKTIANNLTSTVQVFTDSDYQLPYVLGSAHEGCLPPFPADVFMIPQYGYLTLNDGSQAVGRSSFYCLEYFPSQMLRTGNNFQFSYEFENVPFHSSYAHSQSLDRLMNPLIDQYLYYLSKTINGSGQNQQTWKFSVAGPSNMAVQGRNYIPGPSYRQQRVSTTVTQNNNSEFAWPGASSWALNGRNSLMNPGPAMASHKEGEDRFFPLSGSLIFGKQGTGRDNVDADKVMITNEEEIKTTNPVATESYGQVATNHQSARAQAQTGWVQNQGILPGMVWQDRDVYLQGPIWAKIPHTDGNFHPSPLMGGFGMKHPPPQILIKNTPVPADPPTAFNKGKLNSFITQYSTGQVSVEIEWELQKENSKRWNPEIQYTSNYYKSNNVEFAVNTEGVYSEPRPIGTRYLTRNL

SEQ ID NO: 455 - DNA, 2208 bp, synthetic construct
  misc_feature 1..2208: note = Adeno Associated Virus Capsid Protein Variant
  source 1..2208: mol_type = other DNA
atggctgccgatggttatcttccagattggctcgaggacaaccttagtgaaggaattcgcgagtggtgggctttgaaacctggagcccctcaacccaaggcaaatcaacaacatcaagacaacgctcgaggtcttgtgcttccgggttacaaataccttggacccggcaacggactcgacaagggggagccggtcaacgcagcagacgcggcggccctcgagcacgacaaggcctacgaccagcagctcaaggccggagacaacccgtacctcaagtacaaccacgccgacgccgagttccaggagcggctcaaagaagatacgtcttttgggggcaacctcgggcgagcagtcttccaggccaaaaagaggcttcttgaacctcttggtctggttgaggaagcggctaagacggctcctggaaagaagaggcctgtagagcagtctcctcaggaaccggactcctccgcgggtattggcaaatcgggtgcagggcccgctaaaaagagactcaatttcggtcagactggcgacacagagtcagtcccagaccctcaaccaatcggagaacctcccgcagccccctcaggtgtgggatctcttacaatggcttcaggtggtggcgcaccagtggcagacaataacgaaggtgccgatggagtgggtagttcctcgggaaattggcattgcgattcccaatggctgggggacagagtcatcaccaccagcacccgaacctgggccctgcccacctacaacaatcacctctacaagcaaatctccaacagcacatctggaggatcttcaaatgacaacgcctacttcggctacagcaccccctgggggtattttgacttcaacagattccactgccacttctcaccacgtgactggcagcgactcatcaacaacaactggggattccggcctaagcgactcaacttcaagctcttcaacattcaggtcaaagaggttacggacaacaatggagtcaagaccatcgccaataaccttaccagcacggtccaggtcttcacggactcagactatcagctcccgtacgtgctcgggtcggctcacgagggctgcctcccgccgttcccagcggacgttttcatgattcctcagtacgggtatctgacgcttaatgatggaagccaggccgtgggtcgttcgtccttttactgcctggaatatttcccgtcgcaaatgctaagaacgggtaacaacttccagttcagctacgagtttgagaacgtacctttccatagcagctacgctcacagccaaagcctggaccgactaatgaatccactcatcgaccaatacttgtactatctctcaaagactattaacggttctggacagaatcaacaaacgctaaaattcagtgtggccggacccagcaacatggctgtccagggaagaaactacatacctggacccagctaccgacaacaacgtgtctcaaccactgtgactcaaaacaacaacagcgaatttgcttggcctggagcttcttcttgggctctcaatggacgtaatagcttgatgaatcctggacctgctatggccagccacaaagaaggagaggaccgtttctttcctttgtctggatctttaatttttggcaaacaaggaactggaagagacaacgtggatgcggacaaagtcatgataaccaacgaagaagaaattaaaactactaacccggtagcaacggagtcctatggacaagtggccacaaaccaccagagtgcccgggcacaggcgcagaccggctgggttcaaaaccaaggaatacttccgggtatggtttggcaggacagagatgtgtacctgcaaggacccatttgggccaaaattcctcacacggacggcaactttcacccttctccgctgatgggagggtttggaatgaagcacccgcctcctcagatcctcatcaaaaacacacctgtacctgcggatcctccaacggccttcaacaagggcaagctgaactctttcatcacccagtattctactggccaagtcagcgtggagatcgagtgggagctgcagaaggaaaacagcaagcgctggaacccggagatccagtacacttccaactattacaagtctaataatgttgaatttgctgttaatactgaaggtgtatatagtgaaccccgccccattggcaccagatacctgactcgtaatctg

SEQ ID NO: 456 - protein, 736 aa, synthetic construct
  REGION 1..736: note = Adeno Associated Virus Capsid Protein Variant
MAADGYLPDWLEDNLSEGIREWWALKPGAPQPKANQQHQDNARGLVLPGYKYLGPGNGLDKGEPVNAADAAALEHDKAYDQQLKAGDNPYLKYNHADAEFQERLKEDTSFGGNLGRAVFQAKKRLLEPLGLVEEAAKTAPGKKRPVEQSPQEPDSSAGIGKSGAGPAKKRLNFGQTGDTESVPDPQPIGEPPAAPSGVGSLTMASGGGAPVADNNEGADGVGSSSGNWHCDSQWLGDRVITTSTRTWALPTYNNHLYKQISNSTSGGSSNDNAYFGYSTPWGYFDFNRFHCHFSPRDWQRLINNNWGFRPKRLNFKLFNIQVKEVTDNNGVKTIANNLTSTVQVFTDSDYQLPYVLGSAHEGCLPPFPADVFMIPQYGYLTLNDGSQAVGRSSFYCLEYFPSQMLRTGNNFQFSYEFENVPFHSSYAHSQSLDRLMNPLIDQYLYYLSKTINGSGQNQQTLKFSVAGPSNMAVQGRNYIPGPSYRQQRVSTTVTQNNNSEFAWPGASSWALNGRNSLMNPGPAMASHKEGEDRFFPLSGSLIFGKQGTGRDNVDADKVMITNEEEIKTTNPVATESYGQVATNHQSARAQAQTGWVQNQGILPGMVWQDRDVYLQGPIWAKIPHTDGNFHPSPLMGGFGMKHPPPQILIKNTPVPADPPTAFNKGKLNSFITQYSTGQVSVEIEWELQKENSKRWNPEIQYTSNYYKSNNVEFAVNTEGVYSEPRPIGTRYLTRNL

SEQ ID NO: 457 - DNA, 2208 bp, synthetic construct
  misc_feature 1..2208: note = Adeno Associated Virus Capsid Protein Variant
  source 1..2208: mol_type = other DNA
atggctgccgatggttatcttccagattggctcgaggacctgcttagtgaaggaattcgcgagtggtgggctttgaaacctggagcccctcaacccaaggcaaatcaacaacatcaagacaacgctcgaggtcttgtgcttccgggttacaaataccttggacccggcaacggactcgacaagggggagccggtcaacgcagcagacgcggcggccctcgagcacgacaaggcctacgaccagcagctcaaggccggagacaacccgtacctcaagtacaaccacgccgacgccgagttccaggagcggctcaaagaagatacgtcttttgggggcaacctcgggcgagcagtcttccaggccaaaaagaggcttcttgaacctcttggtctggttgaggaagcggctaagacggctcctggaaagaagaggcctgtagagcagtctcctcaggaaccggactcctccgcgggtattggcaaatcgggtgcacagcccgctaaaaagagactcaatttcggtcagactggcgacacagagtcagtcccagaccctcaaccaatcggagaacctcccgcagccccctcaggtgtgggatctcttacaatggcttcaggtggtggcgcaccagtggcagacaataacgaaggtgccgatggagtgggtagttcctcgggaaattggcattgcgattcccaatggctgggggacagagtcatcaccaccagcacccgaacctgggccctgcccacctacaacaatcacctctacaagcaaatctccaacagcacatctggaggatcttcaaatgacaacgcctacttcggctacagcaccccctgggggtattttgacttcaacagattccactgccacttctcaccacgtgactggcagcgactcatcaacaacaactggggattccggcctaagcgactcaacttcaagctcttcaacattcaggtcaaagaggttacggacaacaatggagtcaagaccatcgccaataaccttaccagcacggtccaggtcttcacggactcagactatcagctcccgtacgtgctcgggtcggctcacgagggctgcctcccgccgttcccagcggacgttttcatgattcctcagtacgggtatctgacgcttaatgatggaagccaggccgtgggtcgttcgtccttttactgcctggaatatttcccgtcgcaaatgctaagaacgggtaacaacttccagttcagctacgagtttgagaacgtacctttccatagcagctacgctcacagccaaagcctggaccgactaatgaatccactcatcgaccaatacttgtactatctctcaaagactattaacggttctggacagaatcaacaaacgctaaaattcagtgtggccggacccagcaacatggctgtccagggaagaaactacatacctggacccagctaccgacaacaacgtgtctcaaccactgtgactcaaaacaacaacagcgaatttgcttggcctggagcttcttcttgggctctcaatggacgtaatagcttgatgaatcctggacctgctatggccagccacaaagaaggagaggaccgtttctttcctttgtctggatctttaatttttggcaaacaaggaactggaagagacaacgtggatgcggacaaagtcatgataaccaacgaagaagaaattaaaactactaacccggtagcaacggagtcctatggacaagtggccacaaaccaccagagtgcccgggcacaggcgcagaccggctgggttcaaaaccaaggaatacttccgggtatggtttggcaggacagagatgtgtacctgcaaggacccatttgggccaaaattcctcacacggacggcaactttcacccttctccgctgatgggagggtttggaatgaagcacccgcctcctcagatcctcatcaaaaacacacctgtacctgcggatcctccaacggccttcaacaagggcaagctgaactctttcatcacccagtattctactggccaagtcagcgtggagatcgagtgggagctgcagaaggaaaacagcaagcgctggaacccggagatccagtacacttccaactattacaagtctaataatgttgaatttgctgttaatactgaaggtgtatatagtgaaccccgccccattggcaccagatacctgactcgtaatctg

SEQ ID NO: 458 - protein, 736 aa, synthetic construct
  REGION 1..736: note = Adeno Associated Virus Capsid Protein Variant
MAADGYLPDWLEDLLSEGIREWWALKPGAPQPKANQQHQDNARGLVLPGYKYLGPGNGLDKGEPVNAADAAALEHDKAYDQQLKAGDNPYLKYNHADAEFQERLKEDTSFGGNLGRAVFQAKKRLLEPLGLVEEAAKTAPGKKRPVEQSPQEPDSSAGIGKSGAQPAKKRLNFGQTGDTESVPDPQPIGEPPAAPSGVGSLTMASGGGAPVADNNEGADGVGSSSGNWHCDSQWLGDRVITTSTRTWALPTYNNHLYKQISNSTSGGSSNDNAYFGYSTPWGYFDFNRFHCHFSPRDWQRLINNNWGFRPKRLNFKLFNIQVKEVTDNNGVKTIANNLTSTVQVFTDSDYQLPYVLGSAHEGCLPPFPADVFMIPQYGYLTLNDGSQAVGRSSFYCLEYFPSQMLRTGNNFQFSYEFENVPFHSSYAHSQSLDRLMNPLIDQYLYYLSKTINGSGQNQQTLKFSVAGPSNMAVQGRNYIPGPSYRQQRVSTTVTQNNNSEFAWPGASSWALNGRNSLMNPGPAMASHKEGEDRFFPLSGSLIFGKQGTGRDNVDADKVMITNEEEIKTTNPVATESYGQVATNHQSARAQAQTGWVQNQGILPGMVWQDRDVYLQGPIWAKIPHTDGNFHPSPLMGGFGMKHPPPQILIKNTPVPADPPTAFNKGKLNSFITQYSTGQVSVEIEWELQKENSKRWNPEIQYTSNYYKSNNVEFAVNTEGVYSEPRPIGTRYLTRNL

SEQ ID NO: 459 - DNA, 2208 bp, synthetic construct
  misc_feature 1..2208: note = Adeno Associated Virus Capsid Protein Variant
  source 1..2208: mol_type = other DNA
atggctgccgatggttatcttccagattggctcgaggacaaccttagtgaaggaattcgcgagtggtgggctttgaaacctggagcccctcaacccaaggcaaatcaacaacatcaagacaacgctcgaggtcttgtgcttccgggttacaaataccttggacccggcaacggactcgacaagggggagccggtcaacgcagcagacgcggcggccctcgagcacgacaaggcctacgaccagcagctcaaggccggagacaacccgtacctcaagtacaaccacgccgacgccgagttccaggagcggctcaaagaagatacgtcttttgggggcaacctcgggcgagcagtcttccaggccaaaaagaggcttcttgaacctcttggtctggttgaggaagcggctaagacggctcctggaaagaagaggcctgtagagcagtctcctcaggaaccggactcctccgcgggtattggcaaatcgggtgcacagcccgctaaaaagagactcaatttcggtcagactggcgacacagagtcagtcccagaccctcaaccaatcggagaacctcccgcagccccctcaggtgtgggatctcttacaatggcttcaggtggtggcgcaccagtggcagacaataacgaaggtgccgatggagtgggtagttcctcgggaaattggcattgcgattcccaatggctgggggacagagtcatcaccaccagcacccgaacctgggccctgcccacctacaacaatcacctctacaagcaaatctccaacagcacatctggaggatcttcaaatgacaacgcctacttcggctacagcaccccctgggggtattttgacttcaacagattccactgccacttctcaccacgtgactggcagcgactcatcaacaacaactggggattccggcctaagcgactcaacttcaagctcttcaacattcaggtcaaagaggttacggacaacaatggagtcaagaccatcgccaataaccttaccagcacggtccaggtcttcacggactcagactatcagctcccgtacgtgctcgggtcggctcacgagggctgcctcccgccgttcccagcggacgttttcatgattcctcagtacgggtatctgacgcttaatgatggaagccaggccgtgggtcgttcgtccttttactgcctggaatatttcccgtcgcaaatgctaagaacgggtaacaacttccagttcagctacgagtttgagaacgtacctttccatagcagctacgctcacagccaaagcctggaccgactaatgaatccactcatcgaccaatacttgtactatctctcaaagactattaacggttctggacagaatcaacaaacgctaaaattcagtgtggccggacccgataacatggctgtccagggaagaaactacatacctggacccagctaccgacaacaacgtgtctcaaccactgtgactcaaaacaacaacagcgaatttgcttggcctggagcttcttcttgggctctcaatggacgtaatagcttgatgaatcctggacctgctatggccagccacaaagaaggagaggaccgtttctttcctttgtctggatctttaatttttggcaaacaaggaactggaagagacaacgtggatgcggacaaagtcatgataaccaacgaagaagaaattaaaactactaacccggtagcaacggagtcctatggacaagtggccacaaaccaccagagtgcccgggcacaggcgcagaccggctgggttcaaaaccaaggaatacttccgggtatggtttggcaggacagagatgtgtacctgcaaggacccatttgggccaaaattcctcacacggacggcaactttcacccttctccgctgatgggagggtttggaatgaagcacccgcctcctcagatcctcatcaaaaacacacctgtacctgcggatcctccaacggccttcaacaagggcaagctgaactctttcatcacccagtattctactggccaagtcagcgtggagatcgagtgggagctgcagaaggaaaacagcaagcgctggaacccggagatccagtacacttccaactattacaagtctaataatgttgaatttgctgttaatactgaaggtgtatatagtgaaccccgccccattggcaccagatacctgactcgtaatctg

SEQ ID NO: 460 - protein, 736 aa, synthetic construct
  REGION 1..736: note = Adeno Associated Virus Capsid Protein Variant
MAADGYLPDWLEDNLSEGIREWWALKPGAPQPKANQQHQDNARGLVLPGYKYLGPGNGLDKGEPVNAADAAALEHDKAYDQQLKAGDNPYLKYNHADAEFQERLKEDTSFGGNLGRAVFQAKKRLLEPLGLVEEAAKTAPGKKRPVEQSPQEPDSSAGIGKSGAQPAKKRLNFGQTGDTESVPDPQPIGEPPAAPSGVGSLTMASGGGAPVADNNEGADGVGSSSGNWHCDSQWLGDRVITTSTRTWALPTYNNHLYKQISNSTSGGSSNDNAYFGYSTPWGYFDFNRFHCHFSPRDWQRLINNNWGFRPKRLNFKLFNIQVKEVTDNNGVKTIANNLTSTVQVFTDSDYQLPYVLGSAHEGCLPPFPADVFMIPQYGYLTLNDGSQAVGRSSFYCLEYFPSQMLRTGNNFQFSYEFENVPFHSSYAHSQSLDRLMNPLIDQYLYYLSKTINGSGQNQQTLKFSVAGPDNMAVQGRNYIPGPSYRQQRVSTTVTQNNNSEFAWPGASSWALNGRNSLMNPGPAMASHKEGEDRFFPLSGSLIFGKQGTGRDNVDADKVMITNEEEIKTTNPVATESYGQVATNHQSARAQAQTGWVQNQGILPGMVWQDRDVYLQGPIWAKIPHTDGNFHPSPLMGGFGMKHPPPQILIKNTPVPADPPTAFNKGKLNSFITQYSTGQVSVEIEWELQKENSKRWNPEIQYTSNYYKSNNVEFAVNTEGVYSEPRPIGTRYLTRNL

SEQ ID NO: 461 - DNA, 2208 bp, synthetic construct
  misc_feature 1..2208: note = Adeno Associated Virus Capsid Protein Variant
  source 1..2208: mol_type = other DNA
atggctgccgatggttatcttccagattggctcgaggacaaccttagtgaaggaattcgcgagtggtgggctttgaaacctggagcccctcaacccaaggcaaatcaacaacatcaagacaacgctcgaggtcttgtgcttccgggttacaaataccttggacccggcaacggactcgacaagggggagccggtcaacgcagcagacgcggcggccctcgagcacgacaaggcctacgaccagcagctcaaggccggagacaacccgtacctcaagtacaaccacgccgacgccgagttccaggagcggctcaaagaagatacgtcttttgggggcaacctcgggcgagcagtcttccaggccaaaaagaggcttcttgaacctcttggtctggttgaggaagcggctaagacggctcctggaaagaagaggcctgtagagcagtctcctcaggaaccggactcctccgcgggtattggcaaatcgggtgcacagcccgctaaaaagagactcaatttcggtcagactggcgacacagagtcagtcccagaccctcaaccaatcggagaacctcccgcagccccctcaggtgtgggatctcttacaatggcttcaggtggtggcgcaccagtggcagacaataacgaaggtgccgatggagtgggtagttcctcgggaaattggcattgcgattcccaatggctgggggacagagtcatcaccaccagcacccgaacctgggccctgcccacctacaacaatcacctctacaagcaaatctccaacagcacatctggaggatcttcaaatgacaacgcctacttcggctacagcaccccctgggggtattttgacttcaacagattccactgccacttctcaccacgtgactggcagcgactcatcaacaacaactggggattccggcctaagcgactcaacttcaagctcttcaacattcaggtcaaagaggttacggacaacaatggagtcaagaccatcgccaataaccttaccagcacggtccaggtcttcacggactcagactatcagctcccgtacgtgctcgggtcggctcacgagggctgcctcccgccgttcccagcggacgttttcatgattcctcagtacgggtatctgacgcttaatgatggaagccaggccgtgggtcgttcgtccttttactgcctggaatatttcccgtcgcaaatgctaagaacgggtaacaacttccagttcagctacgagtttgagaacgtacctttccatagcagctacgctcacagccaaagcctggaccgactaatgaatccactcatcgaccaatacttgtactatctctcaaagactattaacggttctggacagaatcaacaaacgctaaaattcagtgtggccggacccagcaacatggctgtccagggaagaaactacatacctggacccagctaccgacaacaacgtgtctcaaccactgtgactcaaaacaacaacagcgaatttgcttggcctggagcttcttcttgggctctcaatggacgtaatagcttgatgaatcctggacctgctatggccagccacaaagaaggagaggaccgtttctttcctttgtctggatctttaatttttggcaaacaaggaactggaagagacaacgtggatgcggacaaagtcatgataaccaacgaagaagaaattaaaactactaacccggtagcaacggagtcctatggacaagtggccacaaaccaccagagtgcccgggcacaggcgcagaccggctgggttcaaaaccaaggaatacttccgggtatggtttggcaggacagagatgtgtacctgcaaggacccatttgggccaaaattcctcacacggacggcaactttcacccttctccgctgatgggagggtttggaatgaaggagccgcctcctcagatcctcatcaaaaacacacctgtacctgcggatcctccaacggccttcaacaagggcaagctgaactctttcatcacccagtattctactggccaagtcagcgtggagatcgagtgggagctgcagaaggaaaacagcaagcgctggaacccggagatccagtacacttccaactattacaagtctaataatgttgaatttgctgttaatactgaaggtgtatatagtgaaccccgccccattggcaccagatacctgactcgtaatctg

SEQ ID NO: 462 - protein, 736 aa, synthetic construct
  REGION 1..736: note = Adeno Associated Virus Capsid Protein Variant
MAADGYLPDWLEDNLSEGIREWWALKPGAPQPKANQQHQDNARGLVLPGYKYLGPGNGLDKGEPVNAADAAALEHDKAYDQQLKAGDNPYLKYNHADAEFQERLKEDTSFGGNLGRAVFQAKKRLLEPLGLVEEAAKTAPGKKRPVEQSPQEPDSSAGIGKSGAQPAKKRLNFGQTGDTESVPDPQPIGEPPAAPSGVGSLTMASGGGAPVADNNEGADGVGSSSGNWHCDSQWLGDRVITTSTRTWALPTYNNHLYKQISNSTSGGSSNDNAYFGYSTPWGYFDFNRFHCHFSPRDWQRLINNNWGFRPKRLNFKLFNIQVKEVTDNNGVKTIANNLTSTVQVFTDSDYQLPYVLGSAHEGCLPPFPADVFMIPQYGYLTLNDGSQAVGRSSFYCLEYFPSQMLRTGNNFQFSYEFENVPFHSSYAHSQSLDRLMNPLIDQYLYYLSKTINGSGQNQQTLKFSVAGPSNMAVQGRNYIPGPSYRQQRVSTTVTQNNNSEFAWPGASSWALNGRNSLMNPGPAMASHKEGEDRFFPLSGSLIFGKQGTGRDNVDADKVMITNEEEIKTTNPVATESYGQVATNHQSARAQAQTGWVQNQGILPGMVWQDRDVYLQGPIWAKIPHTDGNFHPSPLMGGFGMKEPPPQILIKNTPVPADPPTAFNKGKLNSFITQYSTGQVSVEIEWELQKENSKRWNPEIQYTSNYYKSNNVEFAVNTEGVYSEPRPIGTRYLTRNL

SEQ ID NO: 463 - DNA, 2208 bp, synthetic construct
  misc_feature 1..2208: note = Adeno Associated Virus Capsid Protein Variant
  source 1..2208: mol_type = other DNA
atggctgccgatggttatcttccagattggctcgaggacaaccttagtgaaggaattcgcgagtggtgggctttgaaacctggagcccctcaacccaaggcaaatcaacaacatcaagacaacgctcgaggtcttgtgcttccgggttacaaataccttggacccggcaacggactcgacaagggggagccggtcaacgcagcagacgcggcggccctcgagcacgacaaggcctacgaccagcagctcaaggccggagacaacccgtacctcaagtacaaccacgccgacgccgagttccaggagcggctcaaagaagatacgtcttttgggggcaacctcgggcgagcagtcttccaggccaaaaagaggcttcttgaacctcttggtctggttgaggaagcggctaagacggctcctggaaagaagaggcctgtagagcagtctcctcaggaaccggactcctccgcgggtattggcaaatcgggtgcacagcccgctaaaaagagactcaatttcggtcagactggcgacacagagtcagtcccagaccctcaaccaatcggagaacctcccgcagccccctcaggtgtgggatctcttacaatggcttcaggtggtggcgcaccagtggcagacaataacgaaggtgccgatggagtgggtagttcctcgggaaattggcattgcgattcccaatggctgggggacagagtcatcaccaccagcacccgaacctgggccctgcccacctacaacaatcacctctacaagcaaatctccaacagcacatctggaggatcttcaaatgacaacgcctacttcggctacagcaccccctgggggtattttgacttcaacagattccactgccacttctcaccacgtgactggcagcgactcatcaacaacaactggggattccggcctaagcgactcaacttcaagctcttcaacattcaggtcaaagaggttacggacaacaatggagtcaagaccatcgccaataaccttaccagcacggtccaggtcttcacggactcagactatcagctcccgtacgtgctcgggtcggctcacgagggctgcctcccgccgttcccagcggacgttttcatgattcctcagtacgggtatctgacgcttaatgatggaagccaggccgtgggtcgttcgtccttttactgcctggaatatttcccgtcgcaaatgctaagaacgggtaacaacttccagttcagctacgagtttgagaacgtacctttccatagcagctacgctcacagccaaagcctggaccgactaatgaatccactcatcgaccaatacttgtactatctctcaaagactattaacggttctggacagaatcaacaaacgctaaaattcagtgtggccggacccagcaacatggctgtccagggaagaaactacatacctggacccagctaccgacaacaacgtgtctcaaccactgtgactcaaaacaacaacagcgaatttgcttggcctggagcttcttcttgggctctcaatggacgtaatagcttgatgaatcctggacctgctatggccagccacaaagaaggagaggaccgtttctttcctttgtctggatctttaatttttggcaaacaaggaactggaagagacaacgtggatgcggacaaagtcatgataaccaacgaagaagaaattaaaactactaacccggtagcaacggagtcctatggacaagtggccacaaaccaccagagtgcccgggcacaggcgcagaccggctttgttcaaaaccaaggaatacttccgggtatggtttggcaggacagagatgtgtacctgcaaggacccatttgggccaaaattcctcacacggacggcaactttcacccttctccgctgatgggagggtttggaatgaagcacccgcctcctcagatcctcatcaaaaacacacctgtacctgcggatcctccaacggccttcaacaagggcaagctgaactctttcatcacccagtattctactggccaagtcagcgtggagatcgagtgggagctgcagaaggaaaacagcaagcgctggaacccggagatccagtacacttccaactattacaagtctaataatgttgaatttgctgttaatactgaaggtgtatatagtgaaccccgccccattggcaccagatacctgactcgtaatctg

SEQ ID NO: 464 - protein, 736 aa, synthetic construct
  REGION 1..736: note = Adeno Associated Virus Capsid Protein Variant
MAADGYLPDWLEDNLSEGIREWWALKPGAPQPKANQQHQDNARGLVLPGYKYLGPGNGLDKGEPVNAADAAALEHDKAYDQQLKAGDNPYLKYNHADAEFQERLKEDTSFGGNLGRAVFQAKKRLLEPLGLVEEAAKTAPGKKRPVEQSPQEPDSSAGIGKSGAQPAKKRLNFGQTGDTESVPDPQPIGEPPAAPSGVGSLTMASGGGAPVADNNEGADGVGSSSGNWHCDSQWLGDRVITTSTRTWALPTYNNHLYKQISNSTSGGSSNDNAYFGYSTPWGYFDFNRFHCHFSPRDWQRLINNNWGFRPKRLNFKLFNIQVKEVTDNNGVKTIANNLTSTVQVFTDSDYQLPYVLGSAHEGCLPPFPADVFMIPQYGYLTLNDGSQAVGRSSFYCLEYFPSQMLRTGNNFQFSYEFENVPFHSSYAHSQSLDRLMNPLIDQYLYYLSKTINGSGQNQQTLKFSVAGPSNMAVQGRNYIPGPSYRQQRVSTTVTQNNNSEFAWPGASSWALNGRNSLMNPGPAMASHKEGEDRFFPLSGSLIFGKQGTGRDNVDADKVMITNEEEIKTTNPVATESYGQVATNHQSARAQAQTGFVQNQGILPGMVWQDRDVYLQGPIWAKIPHTDGNFHPSPLMGGFGMKHPPPQILIKNTPVPADPPTAFNKGKLNSFITQYSTGQVSVEIEWELQKENSKRWNPEIQYTSNYYKSNNVEFAVNTEGVYSEPRPIGTRYLTRNL

SEQ ID NO: 465 - DNA, 2208 bp, synthetic construct
  misc_feature 1..2208: note = Adeno Associated Virus Capsid Protein Variant
  source 1..2208: mol_type = other DNA
atggctgccgatggttatcttccagattggctcgaggacaaccttagtgaaggaattcgcgagtggtggaggttgaaacctggagcccctcaacccaaggcaaatcaacaacatcaagacaacgctcgaggtcttgtgcttccgggttacaaataccttggacccggcaacggactcgacaagggggagccggtcaacgcagcagacgcggcggccctcgagcacgacaaggcctacgaccagcagctcaaggccggagacaacccgtacctcaagtacaaccacgccgacgccgagttccaggagcggctcaaagaagatacgtcttttgggggcaacctcgggcgagcagtcttccaggccaaaaagaggcttcttgaacctcttggtctggttgaggaagcggctaagacggctcctggaaagaagaggcctgtagagcagtctcctcaggaaccggactcctccgcgggtattggcaaatcgggtgcacagcccgctaaaaagagactcaatttcggtcagactggcgacacagagtcagtcccagaccctcaaccaatcggagaacctcccgcagccccctcaggtgtgggatctcttacaatggcttcaggtggtggcgcaccagtggcagacaataacgaaggtgccgatggagtgggtagttcctcgggaaattggcattgcgattcccaatggctgggggacagagtcatcaccaccagcacccgaacctgggccctgcccacctacaacaatcacctctacaagcaaatctccaacagcacatctggaggatcttcaaatgacaacgcctacttcggctacagcaccccctgggggtattttgacttcaacagattccactgccacttctcaccacgtgactggcagcgactcatcaacaacaactggggattccggcctaagcgactcaacttcaagctcttcaacattcaggtcaaagaggttacggacaacaatggagtcaagaccatcgccaataaccttaccagcacggtccaggtcttcacggactcagactatcagctcccgtacgtgctcgggtcggctcacgagggctgcctcccgccgttcccagcggacgttttcatgattcctcagtacgggtatctgacgcttaatgatggaagccaggccgtgggtcgttcgtccttttactgcctggaatatttcccgtcgcaaatgctaagaacgggtaacaacttccagttcagctacgagtttgagaacgtacctttccatagcagctacgctcacagccaaagcctggaccgactaatgaatccactcatcgaccaatacttgtactatctctcaaagactattaacggttctggacagaatcaacaaacgctaaaattcagtgtggccggacccagcaacatggctgtccagggaagaaactacatacctggacccagctaccgacaacaacgtgtctcaaccactgtgactcaaaacaacaacagcgaatttgcttggcctggagcttcttcttgggctctcaatggacgtaatagcttgatgaatcctggacctgctatggccagccacaaagaaggagaggaccgtttctttcctttgtctggatctttaatttttggcaaacaaggaactggaagagacaacgtggatgcggacaaagtcatgataaccaacgaagaagaaattaaaactactaacccggtagcaacggagtcctatggacaagtggccacaaaccaccagagtgcccgggcacaggcgcagaccggctgggttcaaaaccaaggaatacttccgggtatggtttggcaggacagagatgtgtacctgcaaggacccatttgggccaaaattcctcacacggacggcaactttcacccttctccgctgatgggagggtttggaatgaagcacccgcctcctcagatcctcatcaaaaacacacctgtacctgcggatcctccaacggccttcaacaagggcaagctgaactctttcatcacccagtattctactggccaagtcagcgtggagatcgagtgggagctgcagaaggaaaacagcaagcgctggaacccggagatccagtacacttccaactattacaagtctaataatgttgaatttgctgttaatactgaaggtgtatatagtgaaccccgccccattggcaccagatacctgactcgtaatctg

SEQ ID NO: 466 - protein, 736 aa, synthetic construct
  REGION 1..736: note = Adeno Associated Virus Capsid Protein Variant
MAADGYLPDWLEDNLSEGIREWWRLKPGAPQPKANQQHQDNARGLVLPGYKYLGPGNGLDKGEPVNAADAAALEHDKAYDQQLKAGDNPYLKYNHADAEFQERLKEDTSFGGNLGRAVFQAKKRLLEPLGLVEEAAKTAPGKKRPVEQSPQEPDSSAGIGKSGAQPAKKRLNFGQTGDTESVPDPQPIGEPPAAPSGVGSLTMASGGGAPVADNNEGADGVGSSSGNWHCDSQWLGDRVITTSTRTWALPTYNNHLYKQISNSTSGGSSNDNAYFGYSTPWGYFDFNRFHCHFSPRDWQRLINNNWGFRPKRLNFKLFNIQVKEVTDNNGVKTIANNLTSTVQVFTDSDYQLPYVLGSAHEGCLPPFPADVFMIPQYGYLTLNDGSQAVGRSSFYCLEYFPSQMLRTGNNFQFSYEFENVPFHSSYAHSQSLDRLMNPLIDQYLYYLSKTINGSGQNQQTLKFSVAGPSNMAVQGRNYIPGPSYRQQRVSTTVTQNNNSEFAWPGASSWALNGRNSLMNPGPAMASHKEGEDRFFPLSGSLIFGKQGTGRDNVDADKVMITNEEEIKTTNPVATESYGQVATNHQSARAQAQTGWVQNQGILPGMVWQDRDVYLQGPIWAKIPHTDGNFHPSPLMGGFGMKHPPPQILIKNTPVPADPPTAFNKGKLNSFITQYSTGQVSVEIEWELQKENSKRWNPEIQYTSNYYKSNNVEFAVNTEGVYSEPRPIGTRYLTRNL

SEQ ID NO: 467 - DNA, 2208 bp, synthetic construct
  misc_feature 1..2208: note = Adeno Associated Virus Capsid Protein Variant
  source 1..2208: mol_type = other DNA
atggctgccgatggttatcttccagattggctcgaggacaaccttagtgaaggaattcgcgagtggtgggctttgaaacctggagcccctcaacccaaggcaaatcaacaacatcaagacaacgctcgaggtcttgtgcttccgggttacaaataccttggacccggcaacggactcgacaagggggagccggtcaacgcagcagacgcggcggccctcgagcacgacaaggcctacgaccagcagctcaaggccggagacaacccgtacctcaagtacaaccacgccgacgccgagttccaggagcggctcaaagaagatacgtcttttgggggcaacctcgggcgagcagtcttccaggccaaaaagaggcttcttgaacctcttggtctggttgaggaagcggctaagacggctcctggaaagaagaggcctgtagagcagtctcctcaggaaccggactcctccgcgggtattggcaaatcgggtgcacagcccgctaaaaagagactcaatttcggtcagactggcgacacagagtcagtcccagaccctcaaccaatcggagaacctcccgcagccccctcaggtgtgggatctcttacaatggcttcaggtggtggcgcaccagtggcagacaataacgaaggtgccgatggagtgggtagttcctcgggaaattggcattgcgattcccaatggctgggggacagagtcatcaccaccagcacccgaacctgggccctgcccacctacaacaatcacctctacaagcaaatctccaacagcacatctggaggatcttcaaatgacaacgcctacttcggctacagcaccccctgggggtattttgacttcaacagattccactgccacttctcaccacgtgactggcagcgactcatcaacaacaactggggattccggcctaagcgactcaacttcaagctcttcaacattcaggtcaaagaggttacggacaacaatggagtcaagaccatcgccaataaccttaccagcacggtccaggtcttcacggactcagactatcagctcccgtacgtgctcgggtcggctcacgagggctgcctcccgccgttcccagcggacgttttcatgattcctcagtacgggtatctgacgcttaatgatggaagccaggccgtgggtcgttcgtccttttactgcctggaatatttcccgtcgcaaatgctaagaacgggtaacaacttccagttcaggtacgagtttgagaacgtacctttccatagcagctacgctcacagccaaagcctggaccgactaatgaatccactcatcgaccaatacttgtactatctctcaaagactattaacggttctggacagaatcaacaaacgctaaaattcagtgtggccggacccagcaacatggctgtccagggaagaaactacatacctggacccagctaccgacaacaacgtgtctcaaccactgtgactcaaaacaacaacagcgaatttgcttggcctggagcttcttcttgggctctcaatggacgtaatagcttgatgaatcctggacctgctatggccagccacaaagaaggagaggaccgtttctttcctttgtctggatctttaatttttggcaaacaaggaactggaagagacaacgtggatgcggacaaagtcatgataaccaacgaagaagaaattaaaactactaacccggtagcaacggagtcctatggacaagtggccacaaaccaccagagtgcccgggcacaggcgcagaccggctgggttcaaaaccaaggaatacttccgggtatggtttggcaggacagagatgtgtacctgcaaggacccatttgggccaaaattcctcacacggacggcaactttcacccttctccgctgatgggagggtttggaatgaagcacccgcctcctcagatcctcatcaaaaacacacctgtacctgcggatcctccaacggccttcaacaagggcaagctgaactctttcatcacccagtattctactggccaagtcagcgtggagatcgagtgggagctgcagaaggaaaacagcaagcgctggaacccggagatccagtacacttccaactattacaagtctaataatgttgaatttgctgttaatactgaaggtgtatatagtgaaccccgccccattggcaccagatacctgactcgtaatctg

SEQ ID NO: 468 - protein, 736 aa, synthetic construct
  REGION 1..736: note = Adeno Associated Virus Capsid Protein Variant
MAADGYLPDWLEDNLSEGIREWWALKPGAPQPKANQQHQDNARGLVLPGYKYLGPGNGLDKGEPVNAADAAALEHDKAYDQQLKAGDNPYLKYNHADAEFQERLKEDTSFGGNLGRAVFQAKKRLLEPLGLVEEAAKTAPGKKRPVEQSPQEPDSSAGIGKSGAQPAKKRLNFGQTGDTESVPDPQPIGEPPAAPSGVGSLTMASGGGAPVADNNEGADGVGSSSGNWHCDSQWLGDRVITTSTRTWALPTYNNHLYKQISNSTSGGSSNDNAYFGYSTPWGYFDFNRFHCHFSPRDWQRLINNNWGFRPKRLNFKLFNIQVKEVTDNNGVKTIANNLTSTVQVFTDSDYQLPYVLGSAHEGCLPPFPADVFMIPQYGYLTLNDGSQAVGRSSFYCLEYFPSQMLRTGNNFQFRYEFENVPFHSSYAHSQSLDRLMNPLIDQYLYYLSKTINGSGQNQQTLKFSVAGPSNMAVQGRNYIPGPSYRQQRVSTTVTQNNNSEFAWPGASSWALNGRNSLMNPGPAMASHKEGEDRFFPLSGSLIFGKQGTGRDNVDADKVMITNEEEIKTTNPVATESYGQVATNHQSARAQAQTGWVQNQGILPGMVWQDRDVYLQGPIWAKIPHTDGNFHPSPLMGGFGMKHPPPQILIKNTPVPADPPTAFNKGKLNSFITQYSTGQVSVEIEWELQKENSKRWNPEIQYTSNYYKSNNVEFAVNTEGVYSEPRPIGTRYLTRNL

SEQ ID NO: 469 - DNA, 2208 bp, synthetic construct
  misc_feature 1..2208: note = Adeno Associated Virus Capsid Protein Variant
  source 1..2208: mol_type = other DNA
atggctgccgatggttatcttccagattggctcgaggacaaccttagtgaaggaattcgcgagtggtgggctttgaaacctggagcccctcaacccaaggcaaatcaacaacatcaagacaacgctcgaggtcttgtgcttccgggttacaaataccttggacccggcaacggactcgacaagggggagccggtcaacgcagcagacgcggcggccctcgagcacgacaaggcctacgaccagcagctcaaggccggagacaacccgtacctcaagtacaaccacgccgacgccgagttccaggagcggctcaaagaagatacgtcttttgggggcaacctcgggcgagcagtcttccaggccaaaaagaggcttcttgaacctcttggtctggttgaggaagcggctaagacggctcctggaaagaagaggcctgtagagcagtctcctcaggaaccggactcctccgcgggtattggcaaatcgggtgcacagcccgctaaaaagagactcaatttcggtcagactggcgacacagagtcagtcccagaccctcaaccaatcggagaacctcccgcagccccctcaggtgtgggatctcttacaatggcttcaggtggtggcgcaccagtggcagacaataacgaaggtgccgatggagtgggtagttcctcgggaaattggcattgcgattcccaatggctgggggacagagtcatcaccaccagcacccgaacctgggccctgcccacctacaacaatcacctctacaagcaaatctccaacagcacatctggaggatcttcaaatgacaacgcctacttcggctacagcaccccctgggggtattttgacttcaacagattccactgccacttctcaccacgtgactggcagcgactcatcaacaacaactggggattccggcctaagcgactcaacttcaagctcttcaacattcaggtcaaagaggttacggacaacaatggagtcaagaccatcgccaataaccttaccagcacggtccaggtcttcacggactcagactatcagctcccgtacgtgctcgggtcggctcacgagggctgcctcccgccgttcccagcggacgttttcatgattcctcagtacgggtatctgacgcttaatgatggaagccaggccgtgggtcgttcgtccttttactgcctggaatatttcccgtcgcaaatgctaagaacgggtaacaacttccagttcagctacgagtttgagaacgtacctttccatagcagctacgctcacagccaaagcctggaccgactaatgaatccactcatcgaccaatacttgtactatctctcaaagactattaacggttctggacagaatcaacaaacgctaaaattcagtgtggccggacccagcaacatggctgtccagggaagaaactacatacctggacccagctaccgacaacaacgtgtctcaaccactgtgactcaaaacaacaacagcgaatttgcttggcctggagcttcttcttgggctctcgggggacgtaatagcttgatgaatcctggacctgctatggccagccacaaagaaggagaggaccgtttctttcctttgtctggatctttaatttttggcaaacaaggaactggaagagacaacgtggatgcggacaaagtcatgataaccaacgaagaagaaattaaaactactaacccggtagcaacggagtcctatggacaagtggccacaaaccaccagagtgcccgggcacaggcgcagaccggctgggttcaaaaccaaggaatacttccgggtatggtttggcaggacagagatgtgtacctgcaaggacccatttgggccaaaattcctcacacggacggcaactttcacccttctccgctgatgggagggtttggaatgaagcacccgcctcctcagatcctcatcaaaaacacacctgtacctgcggatcctccaacggccttcaacaagggcaagctgaactctttcatcacccagtattctactggccaagtcagcgtggagatcgagtgggagctgcagaaggaaaacagcaagcgctggaacccggagatccagtacacttccaactattacaagtctaataatgttgaatttgctgttaatactgaaggtgtatatagtgaaccccgccccattggcaccagatacctgactcgtaatctg

SEQ ID NO: 470 - protein, 736 aa, synthetic construct
  REGION 1..736: note = Adeno Associated Virus Capsid Protein Variant
MAADGYLPDWLEDNLSEGIREWWALKPGAPQPKANQQHQDNARGLVLPGYKYLGPGNGLDKGEPVNAADAAALEHDKAYDQQLKAGDNPYLKYNHADAEFQERLKEDTSFGGNLGRAVFQAKKRLLEPLGLVEEAAKTAPGKKRPVEQSPQEPDSSAGIGKSGAQPAKKRLNFGQTGDTESVPDPQPIGEPPAAPSGVGSLTMASGGGAPVADNNEGADGVGSSSGNWHCDSQWLGDRVITTSTRTWALPTYNNHLYKQISNSTSGGSSNDNAYFGYSTPWGYFDFNRFHCHFSPRDWQRLINNNWGFRPKRLNFKLFNIQVKEVTDNNGVKTIANNLTSTVQVFTDSDYQLPYVLGSAHEGCLPPFPADVFMIPQYGYLTLNDGSQAVGRSSFYCLEYFPSQMLRTGNNFQFSYEFENVPFHSSYAHSQSLDRLMNPLIDQYLYYLSKTINGSGQNQQTLKFSVAGPSNMAVQGRNYIPGPSYRQQRVSTTVTQNNNSEFAWPGASSWALGGRNSLMNPGPAMASHKEGEDRFFPLSGSLIFGKQGTGRDNVDADKVMITNEEEIKTTNPVATESYGQVATNHQSARAQAQTGWVQNQGILPGMVWQDRDVYLQGPIWAKIPHTDGNFHPSPLMGGFGMKHPPPQILIKNTPVPADPPTAFNKGKLNSFITQYSTGQVSVEIEWELQKENSKRWNPEIQYTSNYYKSNNVEFAVNTEGVYSEPRPIGTRYLTRNL

SEQ ID NO: 471 - DNA, 2208 bp, synthetic construct
  misc_feature 1..2208: note = Adeno Associated Virus Capsid Protein Variant
  source 1..2208: mol_type = other DNA
atggctgccgatggttatcttccagattggctcgaggacaaccttagtgaaggaattcgcgagtggtgggctttgaaacctggagcccctcaacccaaggcaaatcaacaacatcaagacaacgctcgaggtcttgtgcttccgggttacaaataccttggacccggcaacggactcgacaagggggagccggtcaacgcagcagacgcggcggccctcgagcacgacaaggcctacgaccagcagctcaaggccggagacaacccgtacctcaagtacaaccacgccgacgccgagttccaggagcggctcaaagaagatacgtcttttgggggcaacctcgggcgagcagtcttccaggccaaaaagaggcttcttgaacctcttggtctggttgaggaagcggctaagacggctcctggaaagaagaggcctgtagagcagtctcctcaggaaccggactcctccgcgggtattggcaaatcgggtgcacagcccgctaaaaagagactcaatttcggtcagactggcgacacagagtcagtcccagaccctcaaccaatcggagaacctcccgcagccccctcaggtgtgggatctcttacaatggcttcaggtggtggcgcaccagtggcagacaataacgaaggtgccgatggagtgggtagttcctcgggaaattggcattgcgattcccaatggctgggggacagagtcatcaccaccagcacccgaacctgggccctgcccacctacaacaatcacctctacaagcaaatctccaacagcacatctggaggatcttcaaatgacaacgcctacttcggctacagcaccccctgggggtattttgacttcaacagattccactgccacttctcaccacgtgactggcagcgactcatcaacaacaactggggattccggcctaagcgactcaacttcaagctcttcaacattcaggtcaaagaggttacggacaacaatggagtcaagaccatcgccaataaccttaccagcacggtccaggtcttcacggactcagactatcagctcccgtacgtgctcgggtcggctcacgagggctgcctcccgccgttcccagcggacgttttcatgattcctcagtacgggtatctgacgcttaatgatggaagccaggccgtgggtcgttcgtccttttactgcctggaatatttcccgtcgcaaatgctaagaacgggtaacaacttccagttcagctacgagtttgagaacgtacctttccatagcagctacgctcacagccaaagcctggaccgactaatgaatccactcatcgaccaatacttgtactatctctcaaagactattaacggttctggacagaatcaacaaacgctaaaattcagtgtggccggacccagcaacatggctgtccagggaagaaactacatacctggacccagctaccgacaacaacgtgtctcaaccactgtgactcaaaacaacaacagcgaatttgcttggcctggagcttcttcttgggctctcaatggacgtaatagcttgatgtcgcctggacctgctatggccagccacaaagaaggagaggaccgtttctttcctttgtctggatctttaatttttggcaaacaaggaactggaagagacaacgtggatgcggacaaagtcatgataaccaacgaagaagaaattaaaactactaacccggtagcaacggagtcctatggacaagtggccacaaaccaccagagtgcccgggcacaggcgcagaccggctgggttcaaaaccaaggaatacttccgggtatggtttggcaggacagagatgtgtacctgcaaggacccatttgggccaaaattcctcacacggacggcaactttcacccttctccgctgatgggagggtttggaatgaagcacccgcctcctcagatcctcatcaaaaacacacctgtacctgcggatcctccaacggccttcaacaagggcaagctgaactctttcatcacccagtattctactggccaagtcagcgtggagatcgagtgggagctgcagaaggaaaacagcaagcgctggaacccggagatccagtacacttccaactattacaagtctaataatgttgaatttgctgttaatactgaaggtgtatatagtgaaccccgccccattggcaccagatacctgactcgtaatctg

SEQ ID NO: 472 - protein, 736 aa, synthetic construct
  REGION 1..736: note = Adeno Associated Virus Capsid Protein Variant
MAADGYLPDWLEDNLSEGIREWWALKPGAPQPKANQQHQDNARGLVLPGYKYLGPGNGLDKGEPVNAADAAALEHDKAYDQQLKAGDNPYLKYNHADAEFQERLKEDTSFGGNLGRAVFQAKKRLLEPLGLVEEAAKTAPGKKRPVEQSPQEPDSSAGIGKSGAQPAKKRLNFGQTGDTESVPDPQPIGEPPAAPSGVGSLTMASGGGAPVADNNEGADGVGSSSGNWHCDSQWLGDRVITTSTRTWALPTYNNHLYKQISNSTSGGSSNDNAYFGYSTPWGYFDFNRFHCHFSPRDWQRLINNNWGFRPKRLNFKLFNIQVKEVTDNNGVKTIANNLTSTVQVFTDSDYQLPYVLGSAHEGCLPPFPADVFMIPQYGYLTLNDGSQAVGRSSFYCLEYFPSQMLRTGNNFQFSYEFENVPFHSSYAHSQSLDRLMNPLIDQYLYYLSKTINGSGQNQQTLKFSVAGPSNMAVQGRNYIPGPSYRQQRVSTTVTQNNNSEFAWPGASSWALNGRNSLMSPGPAMASHKEGEDRFFPLSGSLIFGKQGTGRDNVDADKVMITNEEEIKTTNPVATESYGQVATNHQSARAQAQTGWVQNQGILPGMVWQDRDVYLQGPIWAKIPHTDGNFHPSPLMGGFGMKHPPPQILIKNTPVPADPPTAFNKGKLNSFITQYSTGQVSVEIEWELQKENSKRWNPEIQYTSNYYKSNNVEFAVNTEGVYSEPRPIGTRYLTRNL

SEQ ID NO: 473 - DNA, 2208 bp, synthetic construct
  misc_feature 1..2208: note = Adeno Associated Virus Capsid Protein Variant
  source 1..2208: mol_type = other DNA
atggctgccgatggttatcttccagattggctcgaggacaaccttagtgaaggaattcgcgagtggtgggctttgaaacctggagcccctcaacccaaggcaaatcaacaacatcaagacaacgctcgaggtcttgtgcttccgggttacaaataccttggacccggcaacggactcgacaagggggagccggtcaacgcagcagacgcggcggccctcgagcacgacaaggcctacgaccagcagctcaaggccggagacaacccgtacctcaagtacaaccacgccgacgccgagttccaggagcggctcaaagaagatacgtcttttgggggcaacctcgggcgagcagtcttccaggccaaaaagaggcttcttgaacctcttggtctggttgaggaagcggctaagacggctcctggaaagaagaggcctgtagagcagtctcctcaggaaccggactcctcctcgggtattggcaaatcgggtgcacagcccgctaaaaagagactcaatttcggtcagactggcgacacagagtcagtcccagaccctcaaccaatcggagaacctcccgcagccccctcaggtgtgggatctcttacaatggcttcaggtggtggcgcaccagtggcagacaataacgaaggtgccgatggagtgggtagttcctcgggaaattggcattgcgattcccaatggctgggggacagagtcatcaccaccagcacccgaacctgggccctgcccacctacaacaatcacctctacaagcaaatctccaacagcacatctggaggatcttcaaatgacaacgcctacttcggctacagcaccccctgggggtattttgacttcaacagattccactgccacttctcaccacgtgactggcagcgactcatcaacaacaactggggattccggcctaagcgactcaacttcaagctcttcaacattcaggtcaaagaggttacggacaacaatggagtcaagaccatcgccaataaccttaccagcacggtccaggtcttcacggactcagactatcagctcccgtacgtgctcgggtcggctcacgagggctgcctcccgccgttcccagcggacgttttcatgattcctcagtacgggtatctgacgcttaatgatggaagccaggccgtgggtcgttcgtccttttactgcctggaatatttcccgtcgcaaatgctaagaacgggtaacaacttccagttcagctacgagtttgagaacgtacctttccatagcagctacgctcacagccaaagcctggaccgactaatgaatccactcatcgaccaatacttgtactatctctcaaagactattaacggttctggacagaatcaacaaacgctaaaattcagtgtggccggacccagcaacatggctgtccagggaagaaactacatacctggacccagctaccgacaacaacgtgtctcaaccactgtgactcaaaacaacaacagcgaatttgcttggcctggagcttcttcttgggctctcaatggacgtaatagcttgatgaatcctggacctgctatggccagccacaaagaaggagaggaccgtttctttcctttgtctggatctttaatttttggcaaacaaggaactggaagagacaacgtggatgcggacaaagtcatgataaccaacgaagaagaaattaaaactactaacccggtagcaacggagtcctatggacaagtggccacaaaccaccagagtgcccgggcacaggcgcagaccggctgggttcaaaaccaaggaatacttccgggtatggtttggcaggacagagatgtgtacctgcaaggacccatttgggccaaaattcctcacacggacggcaactttcacccttctccgctgatgggagggtttggaatgaagcacccgcctcctcagatcctcatcaaaaacacacctgtacctgcggatcctccaacggccttcaacaagggcaagctgaactctttcatcacccagtattctactggccaagtcagcgtggagatcgagtgggagctgcagaaggaaaacagcaagcgctggaacccggagatccagtacacttccaactattacaagtctaataatgttgaatttgctgttaatactgaaggtgtatatagtgaaccccgccccattggcaccagatacctgactcgtaatctg

SEQ ID NO: 474 - protein, 736 aa, synthetic construct
  REGION 1..736: note = Adeno Associated Virus Capsid Protein Variant
MAADGYLPDWLEDNLSEGIREWWALKPGAPQPKANQQHQDNARGLVLPGYKYLGPGNGLDKGEPVNAADAAALEHDKAYDQQLKAGDNPYLKYNHADAEFQERLKEDTSFGGNLGRAVFQAKKRLLEPLGLVEEAAKTAPGKKRPVEQSPQEPDSSSGIGKSGAQPAKKRLNFGQTGDTESVPDPQPIGEPPAAPSGVGSLTMASGGGAPVADNNEGADGVGSSSGNWHCDSQWLGDRVITTSTRTWALPTYNNHLYKQISNSTSGGSSNDNAYFGYSTPWGYFDFNRFHCHFSPRDWQRLINNNWGFRPKRLNFKLFNIQVKEVTDNNGVKTIANNLTSTVQVFTDSDYQLPYVLGSAHEGCLPPFPADVFMIPQYGYLTLNDGSQAVGRSSFYCLEYFPSQMLRTGNNFQFSYEFENVPFHSSYAHSQSLDRLMNPLIDQYLYYLSKTINGSGQNQQTLKFSVAGPSNMAVQGRNYIPGPSYRQQRVSTTVTQNNNSEFAWPGASSWALNGRNSLMNPGPAMASHKEGEDRFFPLSGSLIFGKQGTGRDNVDADKVMITNEEEIKTTNPVATESYGQVATNHQSARAQAQTGWVQNQGILPGMVWQDRDVYLQGPIWAKIPHTDGNFHPSPLMGGFGMKHPPPQILIKNTPVPADPPTAFNKGKLNSFITQYSTGQVSVEIEWELQKENSKRWNPEIQYTSNYYKSNNVEFAVNTEGVYSEPRPIGTRYLTRNL

SEQ ID NO: 475 - DNA, 2208 bp, synthetic construct
  misc_feature 1..2208: note = Adeno Associated Virus Capsid Protein Variant
  source 1..2208: mol_type = other DNA
atggctgccgatggttatcttccagattggctcgaggacgtgcttagtgaaggaattcgcgagtggtgggctttgaaacctggagcccctcaacccaaggcaaatcaacaacatcaagacaacgctcgaggtcttgtgcttccgggttacaaataccttggacccggcaacggactcgacaagggggagccggtcaacgcagcagacgcggcggccctcgagcacgacaaggcctacgaccagcagctcaaggccggagacaacccgtacctcaagtacaaccacgccgacgccgagttccaggagcggctcaaagaagatacgtcttttgggggcaacctcgggcgagcagtcttccaggccaaaaagaggcttcttgaacctcttggtctggttgaggaagcggctaagacggctcctggaaagaagaggcctgtagagcagtctcctcaggaaccggactcctccgcgggtattggcaaatcgggtgcacagcccgctaaaaagagactcaatttcggtcagactggcgacacagagtcagtcccagaccctcaaccaatcggagaacctcccgcagccccctcaggtgtgggatctcttacaatggcttcaggtggtggcgcaccagtggcagacaataacgaaggtgccgatggagtgggtagttcctcgggaaattggcattgcgattcccaatggctgggggacagagtcatcaccaccagcacccgaacctgggccctgcccacctacaacaatcacctctacaagcaaatctccaacagcacatctggaggatcttcaaatgacaacgcctacttcggctacagcaccccctgggggtattttgacttcaacagattccactgccacttctcaccacgtgactggcagcgactcatcaacaacaactggggattccggcctaagcgactcaacttcaagctcttcaacattcaggtcaaagaggttacggacaacaatggagtcaagaccatcgccaataaccttaccagcacggtccaggtcttcacggactcagactatcagctcccgtacgtgctcgggtcggctcacgagggctgcctcccgccgttcccagcggacgttttcatgattcctcagtacgggtatctgacgcttaatgatggaagccaggccgtgggtcgttcgtccttttactgcctggaatatttcccgtcgcaaatgctaagaacgggtaacaacttccagttcagctacgagtttgagaacgtacctttccatagcagctacgctcacagccaaagcctggaccgactaatgaatccactcatcgaccaatacttgtactatctctcaaagactattaacggttctggacagaatcaacaaacgctaaaattcagtgtggccggacccagcaacatggctgtccagggaagaaactacatacctggacccagctaccgacaacaacgtgtctcaaccactgtgactcaaaacaacaacagcgaatttgcttggcctggagcttcttcttgggctctcaatggacgtaatagcttgatgaatcctggacctgctatggccagccacaaagaaggagaggaccgtttctttcctttgtctggatctttaatttttggcaaacaaggaactggaagagacaacgtggatgcggacaaagtcatgataaccaacgaagaagaaattaaaactactaacccggtagcaacggagtcctatggacaagtggccacaaaccaccagagtgcccgggcacaggcgcagaccggctgggttcaaaaccaaggaatacttccgggtatggtttggcaggacagagatgtgtacctgcaaggacccatttgggccaaaattcctcacacggacggcaactttcacccttctccgctgatgggagggtttggaatgaagcacccgcctcctcagatcctcatcaaaaacacacctgtacctgcggatcctccaacggccttcaacaagggcaagctgaactctttcatcacccagtattctactggccaagtcagcgtggagatcgagtgggagctgcagaaggaaaacagcaagcgctggaacccggagatccagtacacttccaactattacaagtctaataatgttgaatttgctgttaatactgaaggtgtatatagtgaaccccgccccattggcaccagatacctgactcgtaatctg

SEQ ID NO: 476 - protein, 736 aa, synthetic construct
  REGION 1..736: note = Adeno Associated Virus Capsid Protein Variant
MAADGYLPDWLEDVLSEGIREWWALKPGAPQPKANQQHQDNARGLVLPGYKYLGPGNGLDKGEPVNAADAAALEHDKAYDQQLKAGDNPYLKYNHADAEFQERLKEDTSFGGNLGRAVFQAKKRLLEPLGLVEEAAKTAPGKKRPVEQSPQEPDSSAGIGKSGAQPAKKRLNFGQTGDTESVPDPQPIGEPPAAPSGVGSLTMASGGGAPVADNNEGADGVGSSSGNWHCDSQWLGDRVITTSTRTWALPTYNNHLYKQISNSTSGGSSNDNAYFGYSTPWGYFDFNRFHCHFSPRDWQRLINNNWGFRPKRLNFKLFNIQVKEVTDNNGVKTIANNLTSTVQVFTDSDYQLPYVLGSAHEGCLPPFPADVFMIPQYGYLTLNDGSQAVGRSSFYCLEYFPSQMLRTGNNFQFSYEFENVPFHSSYAHSQSLDRLMNPLIDQYLYYLSKTINGSGQNQQTLKFSVAGPSNMAVQGRNYIPGPSYRQQRVSTTVTQNNNSEFAWPGASSWALNGRNSLMNPGPAMASHKEGEDRFFPLSGSLIFGKQGTGRDNVDADKVMITNEEEIKTTNPVATESYGQVATNHQSARAQAQTGWVQNQGILPGMVWQDRDVYLQGPIWAKIPHTDGNFHPSPLMGGFGMKHPPPQILIKNTPVPADPPTAFNKGKLNSFITQYSTGQVSVEIEWELQKENSKRWNPEIQYTSNYYKSNNVEFAVNTEGVYSEPRPIGTRYLTRNL

SEQ ID NO: 477 - DNA, 2208 bp, synthetic construct
  misc_feature 1..2208: note = Adeno Associated Virus Capsid Protein Variant
  source 1..2208: mol_type = other DNA
atggctgccgatggttatcttccagattggctcgaggacaaccttagtgaaggaattcgcgagtggtgggctttgaaacctggagcccctcaacccaaggcaaatcaacaacatcaagacaacgctcgaggtcttgtgcttccgggttacaaataccttggacccggcaacggactcgacaagggggagccggtcaacgcagcagacgcggcggccctcgagcacgacaaggcctacgaccagcagctcaaggccggagacaacccgtacctcaagtacaaccacgccgacgccgagttccaggagcggctcaaagaagatacgtcttttgggggcaacctcgggcgagcagtcttccaggccaaaaagaggcttcttgaacctcttggtctggttgaggaagcggctaagacggctcctggaaagaagaggcctgtagagcagtctcctcaggaaccggactcctccgcgggtattggcaaatcgggtgcacagcccgctaaaaagagactctggttcggtcagactggcgacacagagtcagtcccagaccctcaaccaatcggagaacctcccgcagccccctcaggtgtgggatctcttacaatggcttcaggtggtggcgcaccagtggcagacaataacgaaggtgccgatggagtgggtagttcctcgggaaattggcattgcgattcccaatggctgggggacagagtcatcaccaccagcacccgaacctgggccctgcccacctacaacaatcacctctacaagcaaatctccaacagcacatctggaggatcttcaaatgacaacgcctacttcggctacagcaccccctgggggtattttgacttcaacagattccactgccacttctcaccacgtgactggcagcgactcatcaacaacaactggggattccggcctaagcgactcaacttcaagctcttcaacattcaggtcaaagaggttacggacaacaatggagtcaagaccatcgccaataaccttaccagcacggtccaggtcttcacggactcagactatcagctcccgtacgtgctcgggtcggctcacgagggctgcctcccgccgttcccagcggacgttttcatgattcctcagtacgggtatctgacgcttaatgatggaagccaggccgtgggtcgttcgtccttttactgcctggaatatttcccgtcgcaaatgctaagaacgggtaacaacttccagttcagctacgagtttgagaacgtacctttccatagcagctacgctcacagccaaagcctggaccgactaatgaatccactcatcgaccaatacttgtactatctctcaaagactattaacggttctggacagaatcaacaaacgctaaaattcagtgtggccggacccagcaacatggctgtccagggaagaaactacatacctggacccagctaccgacaacaacgtgtctcaaccactgtgactcaaaacaacaacagcgaatttgcttggcctggagcttcttcttgggctctcaatggacgtaatagcttgatgaatcctggacctgctatggccagccacaaagaaggagaggaccgtttctttcctttgtctggatctttaatttttggcaaacaaggaactggaagagacaacgtggatgcggacaaagtcatgataaccaacgaagaagaaattaaaactactaacccggtagcaacggagtcctatggacaagtggccacaaaccaccagagtgcccgggcacaggcgcagaccggctgggttcaaaaccaaggaatacttccgggtatggtttggcaggacagagatgtgtacctgcaaggacccatttgggccaaaattcctcacacggacggcaactttcacccttctccgctgatgggagggtttggaatgaagcacccgcctcctcagatcctcatcaaaaacacacctgtacctgcggatcctccaacggccttcaacaagggcaagctgaactctttcatcacccagtattctactggccaagtcagcgtggagatcgagtgggagctgcagaaggaaaacagcaagcgctggaacccggagatccagtacacttccaactattacaagtctaataatgttgaatttgctgttaatactgaaggtgtatatagtgaaccccgccccattggcaccagatacctgactcgtaatctg

SEQ ID NO: 478 - protein, 736 aa, synthetic construct
  REGION 1..736: note = Adeno Associated Virus Capsid Protein Variant
MAADGYLPDWLEDNLSEGIREWWALKPGAPQPKANQQHQDNARGLVLPGYKYLGPGNGLDKGEPVNAADAAALEHDKAYDQQLKAGDNPYLKYNHADAEFQERLKEDTSFGGNLGRAVFQAKKRLLEPLGLVEEAAKTAPGKKRPVEQSPQEPDSSAGIGKSGAQPAKKRLWFGQTGDTESVPDPQPIGEPPAAPSGVGSLTMASGGGAPVADNNEGADGVGSSSGNWHCDSQWLGDRVITTSTRTWALPTYNNHLYKQISNSTSGGSSNDNAYFGYSTPWGYFDFNRFHCHFSPRDWQRLINNNWGFRPKRLNFKLFNIQVKEVTDNNGVKTIANNLTSTVQVFTDSDYQLPYVLGSAHEGCLPPFPADVFMIPQYGYLTLNDGSQAVGRSSFYCLEYFPSQMLRTGNNFQFSYEFENVPFHSSYAHSQSLDRLMNPLIDQYLYYLSKTINGSGQNQQTLKFSVAGPSNMAVQGRNYIPGPSYRQQRVSTTVTQNNNSEFAWPGASSWALNGRNSLMNPGPAMASHKEGEDRFFPLSGSLIFGKQGTGRDNVDADKVMITNEEEIKTTNPVATESYGQVATNHQSARAQAQTGWVQNQGILPGMVWQDRDVYLQGPIWAKIPHTDGNFHPSPLMGGFGMKHPPPQILIKNTPVPADPPTAFNKGKLNSFITQYSTGQVSVEIEWELQKENSKRWNPEIQYTSNYYKSNNVEFAVNTEGVYSEPRPIGTRYLTRNL

SEQ ID NO: 479 - DNA, 2208 bp, synthetic construct
  misc_feature 1..2208: note = Adeno Associated Virus Capsid Protein Variant
  source 1..2208: mol_type = other DNA
atggctgccgatggttatcttccagattggctcgaggacaaccttagtgaaggaattcgcgagtggtgggctttgaaacctggagcccctcaacccaaggcaaatcaacaacatcaagacaacgctcgaggtcttgtgcttccgggttacaaataccttggacccggcaacggactcgacaagggggagccggtcaacgcagcagacgcggcggccctcgagcacgacaaggcctacgaccagcagctcaaggccggagacaacccgtacctcaagtacaaccacgccgacgccgagttccaggagcggctcaaagaagatacgtcttttgggggcaacctcgggcgagcagtcttccaggccaaaaagaggcttcttgaacctcttggtctggttgaggaagcggctaagacggctcctggaaagaagaggcctgtagagcagtctcctcaggaaccggactcctccgcgggtattggcaaatcgggtgcacagcccgctcgtaagagactcaatttcggtcagactggcgacacagagtcagtcccagaccctcaaccaatcggagaacctcccgcagccccctcaggtgtgggatctcttacaatggcttcaggtggtggcgcaccagtggcagacaataacgaaggtgccgatggagtgggtagttcctcgggaaattggcattgcgattcccaatggctgggggacagagtcatcaccaccagcacccgaacctgggccctgcccacctacaacaatcacctctacaagcaaatctccaacagcacatctggaggatcttcaaatgacaacgcctacttcggctacagcaccccctgggggtattttgacttcaacagattccactgccacttctcaccacgtgactggcagcgactcatcaacaacaactggggattccggcctaagcgactcaacttcaagctcttcaacattcaggtcaaagaggttacggacaacaatggagtcaagaccatcgccaataaccttaccagcacggtccaggtcttcacggactcagactatcagctcccgtacgtgctcgggtcggctcacgagggctgcctcccgccgttcccagcggacgttttcatgattcctcagtacgggtatctgacgcttaatgatggaagccaggccgtgggtcgttcgtccttttactgcctggaatatttcccgtcgcaaatgctaagaacgggtaacaacttccagttcagctacgagtttgagaacgtacctttccatagcagctacgctcacagccaaagcctggaccgactaatgaatccactcatcgaccaatacttgtactatctctcaaagactattaacggttctggacagaatcaacaaacgctaaaattcagtgtggccggacccagcaacatggctgtccagggaagaaactacatacctggacccagctaccgacaacaacgtgtctcaaccactgtgactcaaaacaacaacagcgaatttgcttggcctggagcttcttcttgggctctcaatggacgtaatagcttgatgaatcctggacctgctatggccagccacaaagaaggagaggaccgtttctttcctttgtctggatctttaatttttggcaaacaaggaactggaagagacaacgtggatgcggacaaagtcatgataaccaacgaagaagaaattaaaactactaacccggtagcaacggagtcctatggacaagtggccacaaaccaccagagtgcccgggcacaggcgcagaccggctgggttcaaaaccaaggaatacttccgggtatggtttggcaggacagagatgtgtacctgcaaggacccatttgggccaaaattcctcacacggacggcaactttcacccttctccgctgatgggagggtttggaatgaagcacccgcctcctcagatcctcatcaaaaacacacctgtacctgcggatcctccaacggccttcaacaagggcaagctgaactctttcatcacccagtattctactggccaagtcagcgtggagatcgagtgggagctgcagaaggaaaacagcaagcgctggaacccggagatccagtacacttccaactattacaagtctaataatgttgaatttgctgttaatactgaaggtgtatatagtgaaccccgccccattggcaccagatacctgactcgtaatctg

SEQ ID NO: 480 - protein, 736 aa, synthetic construct
  REGION 1..736: note = Adeno Associated Virus Capsid Protein Variant
MAADGYLPDWLEDNLSEGIREWWALKPGAPQPKANQQHQDNARGLVLPGYKYLGPGNGLDKGEPVNAADAAALEHDKAYDQQLKAGDNPYLKYNHADAEFQERLKEDTSFGGNLGRAVFQAKKRLLEPLGLVEEAAKTAPGKKRPVEQSPQEPDSSAGIGKSGAQPARKRLNFGQTGDTESVPDPQPIGEPPAAPSGVGSLTMASGGGAPVADNNEGADGVGSSSGNWHCDSQWLGDRVITTSTRTWALPTYNNHLYKQISNSTSGGSSNDNAYFGYSTPWGYFDFNRFHCHFSPRDWQRLINNNWGFRPKRLNFKLFNIQVKEVTDNNGVKTIANNLTSTVQVFTDSDYQLPYVLGSAHEGCLPPFPADVFMIPQYGYLTLNDGSQAVGRSSFYCLEYFPSQMLRTGNNFQFSYEFENVPFHSSYAHSQSLDRLMNPLIDQYLYYLSKTINGSGQNQQTLKFSVAGPSNMAVQGRNYIPGPSYRQQRVSTTVTQNNNSEFAWPGASSWALNGRNSLMNPGPAMASHKEGEDRFFPLSGSLIFGKQGTGRDNVDADKVMITNEEEIKTTNPVATESYGQVATNHQSARAQAQTGWVQNQGILPGMVWQDRDVYLQGPIWAKIPHTDGNFHPSPLMGGFGMKHPPPQILIKNTPVPADPPTAFNKGKLNSFITQYSTGQVSVEIEWELQKENSKRWNPEIQYTSNYYKSNNVEFAVNTEGVYSEPRPIGTRYLTRNL

SEQ ID NO: 481 - DNA, 2208 bp, synthetic construct
  misc_feature 1..2208: note = Adeno Associated Virus Capsid Protein Variant
  source 1..2208: mol_type = other DNA
atggctgccgatggttatcttccagattggctcgaggacaaccttagtgaaggaattcgcgagtggtgggctttgaaacctggagcccctcaacccaaggcaaatcaacaacatcaagacaacgctcgaggtcttgtgcttccgggttacaaataccttggacccggcaacggactcgacaagggggagccggtcaacgcagcagacgcggcggccctcgagcacgacaaggcctacgaccagcagctcaaggccggagacaacccgtacctcaagtacaaccacgccgacgccgagttccaggagcggctcaaagaagatacgtcttttgggggcaacctcgggcgagcagtcttccaggccaaaaagaggcttcttgaacctcttggtctggttgaggaagcggctaagacggctcctggaaagaagaggcctgtagagcagtctcctcaggaaccggactcctccgcgggtattggcaaatcgggtgcacagcccgctaaaaagagactcaatttcggtcagactggcgacacagagtcagtcccagaccctcaaccaatcggagaacctcccgcagccccctcaggtgtgggatctcttacaatggcttcaggtggtggcgcaccagtggcagacaataacgaaggtgccgatggagtgggtagttcctcgggaaattggcattgcgattcccaatggctgggggacagagtcatcaccaccagcacccgaacctgggccctgcccacctacaacaatcacctctacaagcaaatctccaacagcacatctggaggatcttcaaatgacaacgcctacttcggctacagcaccccctgggggtattttgacttcaacagattccactgccacttctcaccacgtgactggcagcgactcatcaacaacaactggggattccggcctaagcgactcaacttcaagctcttcaacattcaggtcaaagaggttacggacaacaatggagtcaagaccatcgccaataaccttaccagcacggtccaggtcttcacggactcagactatcagctcccgtacgtgctcgggtcggctcacgagggctgcctcccgccgttcccagcggacgttttcatgattcctcagtacgggtatctgacgcttaatgatggaagccaggccgtgggtcgttcgtccttttactgcctggaatatttcccgtcgcaaatgctaagaacgggtaacaacttccagttcagctacgagtttgagaacgtacctttccatagcagctacgctcacagccaaagcctggaccgactaatgaatccactcatcgaccaatacttgtactatctctcaaagactattaacggttctggacagaatcaacaaacgctaaaattcagtgtggccggacccagcaacatggctgtccagggaagaaactacatacctggacccagctaccgacaacaacgtgtctcaaccactgtgactcaaaacaacaacagcgaatttgcttggcctggagcttcttcttgggctctcaatggacgtaatagcttgatgaatcctggacctgctatggccagccacaaagaaggagaggaccgtttctttcctttgtctggatctttaatttttggcaaacaaggaactggaagagacaacgtggatgcggacaaagtcatgataaccaacgaagaagaaattaaaactactaacccggtagcaacggagtcctatggacaagtggccacaaaccaccagagtgcccgggcacaggcgcagaccggctgggttcaatggcaaggaatacttccgggtatggtttggcaggacagagatgtgtacctgcaaggacccatttgggccaaaattcctcacacggacggcaactttcacccttctccgctgatgggagggtttggaatgaagcacccgcctcctcagatcctcatcaaaaacacacctgtacctgcggatcctccaacggccttcaacaagggcaagctgaactctttcatcacccagtattctactggccaagtcagcgtggagatcgagtgggagctgcagaaggaaaacagcaagcgctggaacccggagatccagtacacttccaactattacaagtctaataatgttgaatttgctgttaatactgaaggtgtatatagtgaaccccgccccattggcaccagatacctgactcgtaatctg

SEQ ID NO: 482 - protein, 736 aa, synthetic construct
  REGION 1..736: note = Adeno Associated Virus Capsid Protein Variant
MAADGYLPDWLEDNLSEGIREWWALKPGAPQPKANQQHQDNARGLVLPGYKYLGPGNGLDKGEPVNAADAAALEHDKAYDQQLKAGDNPYLKYNHADAEFQERLKEDTSFGGNLGRAVFQAKKRLLEPLGLVEEAAKTAPGKKRPVEQSPQEPDSSAGIGKSGAQPAKKRLNFGQTGDTESVPDPQPIGEPPAAPSGVGSLTMASGGGAPVADNNEGADGVGSSSGNWHCDSQWLGDRVITTSTRTWALPTYNNHLYKQISNSTSGGSSNDNAYFGYSTPWGYFDFNRFHCHFSPRDWQRLINNNWGFRPKRLNFKLFNIQVKEVTDNNGVKTIANNLTSTVQVFTDSDYQLPYVLGSAHEGCLPPFPADVFMIPQYGYLTLNDGSQAVGRSSFYCLEYFPSQMLRTGNNFQFSYEFENVPFHSSYAHSQSLDRLMNPLIDQYLYYLSKTINGSGQNQQTLKFSVAGPSNMAVQGRNYIPGPSYRQQRVSTTVTQNNNSEFAWPGASSWALNGRNSLMNPGPAMASHKEGEDRFFPLSGSLIFGKQGTGRDNVDADKVMITNEEEIKTTNPVATESYGQVATNHQSARAQAQTGWVQWQGILPGMVWQDRDVYLQGPIWAKIPHTDGNFHPSPLMGGFGMKHPPPQILIKNTPVPADPPTAFNKGKLNSFITQYSTGQVSVEIEWELQKENSKRWNPEIQYTSNYYKSNNVEFAVNTEGVYSEPRPIGTRYLTRNL

SEQ ID NO: 483 - DNA, 2208 bp, synthetic construct
  misc_feature 1..2208: note = Adeno Associated Virus Capsid Protein Variant
  source 1..2208: mol_type = other DNA
atggctgccgatggttatcttccagattggctcgaggacaaccttagtgaaggaattcgcgagtggtgggctttgaaacctggagcccctcaacccaaggcaaatcaacaacatcaagacaacgctcgaggtcttgtgcttccgggttacaaataccttggacccggcaacggactcgacaagggggagccggtcaacgcagcagacgcggcggccctcgagcacgacaaggcctacgaccagcagctcaaggccggagacaacccgtacctcaagtacaaccacgccgacgccgagttccaggagcggctcaaagaagatacgtcttttgggggcaacctcgggcgagcagtcttccaggccaaaaagaggcttcttgaacctcttggtctggttgaggaagcggctaagacggctcctggaaagaagaggcctgtagagcagtctcctcaggaaccggactcctccgcgggtattggcaaatcgggtgcacagcccgctaaaaagagactcaatttcggtcagactggcgacacagagtcagtcccagaccctcaaccaatcggagaacctcccgcagccccctcaggtgtgggatctcttacaatggcttcaggtggtggcgcaccagtggcagacaataacgaaggtgccgatggagtgggtagttcctcgggaaattggcattgcgattcccaatggctgggggacagagtcatcaccaccagcacccgaacctgggccctgcccacctacaacaatcacctctacaagcaaatctccaacagcacatctggaggatcttcaaatgacaacgcctacttcggctacagcaccccctgggggtattttgacttcaacagattccactgccacttctcaccacgtgactggcagcgactcatcaacaacaactggggattccggcctaagcgactcaacttcaagctcttcaacattcaggtcaaagaggttacggacaacaatggagtcaagaccatcgccaataaccttaccagcacggtccaggtcttcacggactcagactatcagctcccgtacgtgctcgggtcggctcacgagggctgcctcccgccgttcccagcggacgttttcatgattcctcagtacgggtatctgacgcttaatgatggaagccaggccgtgggtcgttcgtccttttactgcctggaatatttcccgtcgcaaatgctaagaacgggtaacaacttccagttcagctacgagtttgagaacgtacctttccatagcagctacgctcacagccaaagcctggaccgactaatgaatccactcatcgaccaatacttgtactatctctcagagactattaacggttctggacagaatcaacaaacgctaaaattcagtgtggccggacccagcaacatggctgtccagggaagaaactacatacctggacccagctaccgacaacaacgtgtctcaaccactgtgactcaaaacaacaacagcgaatttgcttggcctggagcttcttcttgggctctcaatggacgtaatagcttgatgaatcctggacctgctatggccagccacaaagaaggagaggaccgtttctttcctttgtctggatctttaatttttggcaaacaaggaactggaagagacaacgtggatgcggacaaagtcatgataaccaacgaagaagaaattaaaactactaacccggtagcaacggagtcctatggacaagtggccacaaaccaccagagtgcccgggcacaggcgcagaccggctgggttcaaaaccaaggaatacttccgggtatggtttggcaggacagagatgtgtacctgcaaggacccatttgggccaaaattcctcacacggacggcaactttcacccttctccgctgatgggagggtttggaatgaagcacccgcctcctcagatcctcatcaaaaacacacctgtacctgcggatcctccaacggccttcaacaagggcaagctgaactctttcatcacccagtattctactggccaagtcagcgtggagatcgagtgggagctgcagaaggaaaacagcaagcgctggaacccggagatccagtacacttccaactattacaagtctaataatgttgaatttgctgttaatactgaaggtgtatatagtgaaccccgccccattggcaccagatacctgactcgtaatctg

SEQ ID NO: 484 - protein, 736 aa, synthetic construct
  REGION 1..736: note = Adeno Associated Virus Capsid Protein Variant
MAADGYLPDWLEDNLSEGIREWWALKPGAPQPKANQQHQDNARGLVLPGYKYLGPGNGLDKGEPVNAADAAALEHDKAYDQQLKAGDNPYLKYNHADAEFQERLKEDTSFGGNLGRAVFQAKKRLLEPLGLVEEAAKTAPGKKRPVEQSPQEPDSSAGIGKSGAQPAKKRLNFGQTGDTESVPDPQPIGEPPAAPSGVGSLTMASGGGAPVADNNEGADGVGSSSGNWHCDSQWLGDRVITTSTRTWALPTYNNHLYKQISNSTSGGSSNDNAYFGYSTPWGYFDFNRFHCHFSPRDWQRLINNNWGFRPKRLNFKLFNIQVKEVTDNNGVKTIANNLTSTVQVFTDSDYQLPYVLGSAHEGCLPPFPADVFMIPQYGYLTLNDGSQAVGRSSFYCLEYFPSQMLRTGNNFQFSYEFENVPFHSSYAHSQSLDRLMNPLIDQYLYYLSETINGSGQNQQTLKFSVAGPSNMAVQGRNYIPGPSYRQQRVSTTVTQNNNSEFAWPGASSWALNGRNSLMNPGPAMASHKEGEDRFFPLSGSLIFGKQGTGRDNVDADKVMITNEEEIKTTNPVATESYGQVATNHQSARAQAQTGWVQNQGILPGMVWQDRDVYLQGPIWAKIPHTDGNFHPSPLMGGFGMKHPPPQILIKNTPVPADPPTAFNKGKLNSFITQYSTGQVSVEIEWELQKENSKRWNPEIQYTSNYYKSNNVEFAVNTEGVYSEPRPIGTRYLTRNL

SEQ ID NO: 485 - DNA, 2208 bp, synthetic construct
  misc_feature 1..2208: note = Adeno Associated Virus Capsid Protein Variant
  source 1..2208: mol_type = other DNA
atggctgccgatggttatcttccagattggctcgaggacaaccttagtgaaggaattcgcgagtggtgggctttgaaacctggagcccctcaacccaaggcaaatcaacaacatcaagacaacgctcgaggtcttgtgcttccgggttacaaataccttggacccggcaacggactcgacaagggggagccggtcaacgcagcagacgcggcggccctcgagcacgacaaggcctacgaccagcagctcaaggccggagacaacccgtacctcaagtacaaccacgccgacgccgagttccaggagcggctcaaagaagatacgtcttttgggggcaacctcgggcgagcagtcttccaggccaaaaagaggcttcttgaacctcttggtctggttgaggaagcggctaagacggctcctggaaagaagaggcctgtagagcagtctcctcaggaaccggactcctccgcgggtattggcaaatcgggtgcacagcccgctaaaaagagactcaatttcggtcagactggcgacacagagtcagtcccagaccctcaaccaatcggagaacctcccgcagccccctcaggtgtgggatctcttacaatggcttcaggtggtggcgcaccagtggcagacaataacgaaggtgccgatggagtgggtagttcctcgggaaattggcattgcgattcccaatggctgggggacagagtcatcaccaccagcacccgaacctgggccctgcccacctacaacaatcacctctacaagcaaatctccaacagcacatctggaggatcttcaaatgacaacgcctacttcggctacagcaccccctgggggtattttgacttcaacagattccactgccacttctcaccacgtgactggcagcgactcatcaacaacaactggggattccggcctaagcgactcaacttcaagctcttcaacattcaggtcaaagaggttacggacaacaatggagtcaagaccatcgccaataaccttaccagcacggtccaggtcttcacggactcagactatcagctcccgtacgtgctcgggtcggctcacgagggctgcctcccgccgttcccagcggacgttttcatgattcctcagtacgggtatctgacgcttaatgatggaagccaggccgtgggtcgttcgtccttttactgcctggaatatttcccgtcgcaaatgctaagaacgggtaacaacttccagttcagctacgagtttgagaacgtacctttccatagcagctacgctcacagccaaagcctggaccgactaatgaatccactcatcgaccaatacttgtactatctctcaaggactattaacggttctggacagaatcaacaaacgctaaaattcagtgtggccggacccagcaacatggctgtccagggaagaaactacatacctggacccagctaccgacaacaacgtgtctcaaccactgtgactcaaaacaacaacagcgaatttgcttggcctggagcttcttcttgggctctcaatggacgtaatagcttgatgaatcctggacctgctatggccagccacaaagaaggagaggaccgtttctttcctttgtctggatctttaatttttggcaaacaaggaactggaagagacaacgtggatgcggacaaagtcatgataaccaacgaagaagaaattaaaactactaacccggtagcaacggagtcctatggacaagtggccacaaaccaccagagtgcccgggcacaggcgcagaccggctgggttcaaaaccaaggaatacttccgggtatggtttggcaggacagagatgtgtacctgcaaggacccatttgggccaaaattcctcacacggacggcaactttcacccttctccgctgatgggagggtttggaatgaagcacccgcctcctcagatcctcatcaaaaacacacctgtacctgcggatcctccaacggccttcaacaagggcaagctgaactctttcatcacccagtattctactggccaagtcagcgtggagatcgagtgggagctgcagaaggaaaacagcaagcgctggaacccggagatccagtacacttccaactattacaagtctaataatgttgaatttgctgttaatactgaaggtgtatatagtgaaccccgccccattggcaccagatacctgactcgtaatctg

SEQ ID NO: 486 - protein, 736 aa, synthetic construct
  REGION 1..736: note = Adeno Associated Virus Capsid Protein Variant
MAADGYLPDWLEDNLSEGIREWWALKPGAPQPKANQQHQDNARGLVLPGYKYLGPGNGLDKGEPVNAADAAALEHDKAYDQQLKAGDNPYLKYNHADAEFQERLKEDTSFGGNLGRAVFQAKKRLLEPLGLVEEAAKTAPGKKRPVEQSPQEPDSSAGIGKSGAQPAKKRLNFGQTGDTESVPDPQPIGEPPAAPSGVGSLTMASGGGAPVADNNEGADGVGSSSGNWHCDSQWLGDRVITTSTRTWALPTYNNHLYKQISNSTSGGSSNDNAYFGYSTPWGYFDFNRFHCHFSPRDWQRLINNNWGFRPKRLNFKLFNIQVKEVTDNNGVKTIANNLTSTVQVFTDSDYQLPYVLGSAHEGCLPPFPADVFMIPQYGYLTLNDGSQAVGRSSFYCLEYFPSQMLRTGNNFQFSYEFENVPFHSSYAHSQSLDRLMNPLIDQYLYYLSRTINGSGQNQQTLKFSVAGPSNMAVQGRNYIPGPSYRQQRVSTTVTQNNNSEFAWPGASSWALNGRNSLMNPGPAMASHKEGEDRFFPLSGSLIFGKQGTGRDNVDADKVMITNEEEIKTTNPVATESYGQVATNHQSARAQAQTGWVQNQGILPGMVWQDRDVYLQGPIWAKIPHTDGNFHPSPLMGGFGMKHPPPQILIKNTPVPADPPTAFNKGKLNSFITQYSTGQVSVEIEWELQKENSKRWNPEIQYTSNYYKSNNVEFAVNTEGVYSEPRPIGTRYLTRNL

SEQ ID NO: 487 - DNA, 2208 bp, synthetic construct
  misc_feature 1..2208: note = Adeno Associated Virus Capsid Protein Variant
  source 1..2208: mol_type = other DNA
atggctgccgatggttatcttccagattggctcgaggacaaccttagtgaaggaattcgcgagtggtgggctttgaaacctggagcccctcaacccaaggcaaatcaacaacatcaagacaacgctcgaggtcttgtgcttccgggttacaaataccttggacccggcaacggactcgacaagggggagccggtcaacgcagcagacgcggcggccctcgagcacgacaaggcctacgaccagcagctcaaggccggagacaacccgtacctcaagtacaaccacgccgacgccgagttccaggagcggctcaaagaagatacgtcttttgggggcaacctcgggcgagcagtcttccaggccaaaaagaggcttcttgaacctcttggtctggttgaggaagcggctaagacggctcctggaaagaagaggcctgtagagcagtctcctcaggaaccggactcctccgcgggtattggcaaatcgggtgcacagcccgctaaaaagagactcaatttcggtcagactggcgacacagagtcagtcccagaccctcaaccaatcggagaacctcccgcagccccctcaggtgtgggatctcttacaatggcttcaggtggtggcgcaccagtggcagacaataacgaaggtgccgatggagtgggtagttcctcgggaaattggcattgcgattcccaatggctgggggacagagtcatcaccaccagcacccgaacctgggccctgcccacctacaacaatcacctctacaagcaaatctccaacagcacatctggaggatcttcaaatgacaacgcctacttcggctacagcaccccctgggggtattttgacttcaacagattccactgccacttctcaccacgtgactggcagcgactcatcaacaacaactggggattccggcctaagcgactcaacttcaagctcttcaacattcaggtcaaagaggttacggacaacaatggagtcaagaccatcgccaataaccttaccagcacggtccaggtcttcacggactcagactatcagctcccgtacgtgctcgggtcggctcacgagggctgcctcccgccgttcccagcggacgttttcatgattcctcagtacgggtatctgacgcttaatgatggaagccaggccgtgggtcgttcgtccttttactgcctggaatatttcccgtcgcaaatgctaagaacgggtaacaacttccagttcagctacgagtttgagaacgtacctttccatagcagctacgctcacagccaaagcctggaccgactaatgaatccactcatcgaccaatacttgtactatctctcaaagactattaacggttctggacagaatcaacaaacgctaaaattcagtgtggccggacccagcaacatggctgtccagggaagaaactacatacctggacccagctaccgacaacaacgtgtctcaaccactgtgactcaaaacaacaacagcgaatttgcttggcctggagcttcttcttgggctctcaatggacgtaatagcttgatgaatcctggacctgctatggccagccacaaagaaggagaggaccgtttctttcctttgtctggatctttaatttttggcaaacaaggaactggaagagacaacgtggatgcggacaaagtcatgataaccaacgaagaagaaattaaaactactaacccggtagcaacggagtcctatggacaagtggccacaaaccaccagagtgcccgggcacaggcgcagaccggctgggttcaaaaccaaggaatacttccgggtatggtttggcaggacagagatgtgtacctgcaaggacccatttgggccaaaattcctcacacggacggcaactttcacccttctccgctgatgggagggtttggaatgaagcacccgcctcctcagatcctcatcaaaaacacacctgtacctgcggatcctccaacggccttcaacaagggcaagctgaactctttcatcacccagtattctactggccaagtcagcgtggagatcgagtgggagctgcagaaggaaaacagcaagcgctggaacccggagatccagtacacttccaactattacaagtctaataatgttgaatttgctgttaatactgaaggtgtatatagtgaaccccgccccattggcaccagatacctgactcgtaatatg

SEQ ID NO: 488 - protein, 736 aa, synthetic construct
  REGION 1..736: note = Adeno Associated Virus Capsid Protein Variant
MAADGYLPDWLEDNLSEGIREWWALKPGAPQPKANQQHQDNARGLVLPGYKYLGPGNGLDKGEPVNAADAAALEHDKAYDQQLKAGDNPYLKYNHADAEFQERLKEDTSFGGNLGRAVFQAKKRLLEPLGLVEEAAKTAPGKKRPVEQSPQEPDSSAGIGKSGAQPAKKRLNFGQTGDTESVPDPQPIGEPPAAPSGVGSLTMASGGGAPVADNNEGADGVGSSSGNWHCDSQWLGDRVITTSTRTWALPTYNNHLYKQISNSTSGGSSNDNAYFGYSTPWGYFDFNRFHCHFSPRDWQRLINNNWGFRPKRLNFKLFNIQVKEVTDNNGVKTIANNLTSTVQVFTDSDYQLPYVLGSAHEGCLPPFPADVFMIPQYGYLTLNDGSQAVGRSSFYCLEYFPSQMLRTGNNFQFSYEFENVPFHSSYAHSQSLDRLMNPLIDQYLYYLSKTINGSGQNQQTLKFSVAGPSNMAVQGRNYIPGPSYRQQRVSTTVTQNNNSEFAWPGASSWALNGRNSLMNPGPAMASHKEGEDRFFPLSGSLIFGKQGTGRDNVDADKVMITNEEEIKTTNPVATESYGQVATNHQSARAQAQTGWVQNQGILPGMVWQDRDVYLQGPIWAKIPHTDGNFHPSPLMGGFGMKHPPPQILIKNTPVPADPPTAFNKGKLNSFITQYSTGQVSVEIEWELQKENSKRWNPEIQYTSNYYKSNNVEFAVNTEGVYSEPRPIGTRYLTRNM

SEQ ID NO: 489 - DNA, 2208 bp, synthetic construct
  misc_feature 1..2208: note = Adeno Associated Virus Capsid Protein Variant
  source 1..2208: mol_type = other DNA
atggctgccgatggttatcttccagattggctcgaggacaaccttagtgaaggaattcgcgagtggtgggctttgaaacctggagcccctcaacccaaggcaaatcaacaacatcaagacaacgctcgaggtcttgtgcttccgggttacaaataccttggacccggcaacggactcgacaagggggagccggtcaacgcagcagacgcggcggccctcgagcacgacaaggcctacgaccagcagctcaaggccggagacaacccgtacctcaagtacaaccacgccgacgccgagttccaggagcggctcaaagaagatacgtcttttgggggcaacctcgggcgagcagtcttccaggccaaaaagaggcttcttgaacctcttggtctggttgaggaagcggctaagacggctcctggaaagaagaggcctgtagagcagtctcctcaggaaccggactcctccgcgggtattggcaaatcgggtgcacagcccgctaaaaagagactcaatttcggtcagactggcgacacagagtcagtcccagaccctcaaccaatcggagaacctcccgcagccccctcaggtgtgggatctcttacaatggcttcaggtggtggcgcaccagtggcagacaataacgaaggtgccgatggagtgggtagttcctcgggaaattggcattgcgattcccaatggctgggggacagagtcatcaccaccagcacccgaacctgggccctgcccacctacaacaatcacctctacaagcaaatctccaacagcacatctggaggatcttcaaatgacaacgcctacttcggctacagcaccccctgggggtattttgacttcaacagattccactgccacttctcaccacgtgactggcagcgactcatcaacaacaactggggattccggcctaagcgactcaacttcaagctcttcaacattcaggtcaaagaggttacggacaacaatggagtcaagaccatcgccaataaccttaccagcacggtccaggtcttcacggactcagactatcagctcccgtacgtgctcgggtcggctcacgagggctgcctcccgccgttcccagcggacgttttcatgattcctcagtacgggtatctgacgcttaatgatggaagccaggccgtgggtcgttcgtccttttactgcctggaatatttcccgtcgcaaatgctaagaacgggtaacaacttccagttcagctacgagtttgagaacgtacctttccatagcagctacgctcacagccaaagcctggaccgactaatgaatccactcatcgaccaatacttgtactatctctcaaagactattaacggttctggacagaatcaacaaacgctaaaattcagtgtggccggacccagcaacatggctgtccagggaagaaactacatacctggacccagctaccgacaacaacgtgtctcaaccactgtgactcaaaacaacaacagcgaatttgcttggcctggagcttcttcttgggctctcaatggacgtaatagcttgatgaatcctggacctgctatggccagccacaaagaaggagaggaccgtttctttcctttgtctggatctttaatttttggcaaacaaggaactggaagagacaacgtggatgcggacaaagtcatgataaccaacgaagaagaaattaaaactactaacccggtagcaacggagtcctatggacaagtggccacaaaccaccagagtgcccgggcacaggcgcagaccggctgggttcaaacgcaaggaatacttccgggtatggtttggcaggacagagatgtgtacctgcaaggacccatttgggccaaaattcctcacacggacggcaactttcacccttctccgctgatgggagggtttggaatgaagcacccgcctcctcagatcctcatcaaaaacacacctgtacctgcggatcctccaacggccttcaacaagggcaagctgaactctttcatcacccagtattctactggccaagtcagcgtggagatcgagtgggagctgcagaaggaaaacagcaagcgctggaacccggagatccagtacacttccaactattacaagtctaataatgttgaatttgctgttaatactgaaggtgtatatagtgaaccccgccccattggcaccagatacctgactcgtaatctg

SEQ ID NO: 490 - protein, 736 aa, synthetic construct
  REGION 1..736: note = Adeno Associated Virus Capsid Protein Variant
MAADGYLPDWLEDNLSEGIREWWALKPGAPQPKANQQHQDNARGLVLPGYKYLGPGNGLDKGEPVNAADAAALEHDKAYDQQLKAGDNPYLKYNHADAEFQERLKEDTSFGGNLGRAVFQAKKRLLEPLGLVEEAAKTAPGKKRPVEQSPQEPDSSAGIGKSGAQPAKKRLNFGQTGDTESVPDPQPIGEPPAAPSGVGSLTMASGGGAPVADNNEGADGVGSSSGNWHCDSQWLGDRVITTSTRTWALPTYNNHLYKQISNSTSGGSSNDNAYFGYSTPWGYFDFNRFHCHFSPRDWQRLINNNWGFRPKRLNFKLFNIQVKEVTDNNGVKTIANNLTSTVQVFTDSDYQLPYVLGSAHEGCLPPFPADVFMIPQYGYLTLNDGSQAVGRSSFYCLEYFPSQMLRTGNNFQFSYEFENVPFHSSYAHSQSLDRLMNPLIDQYLYYLSKTINGSGQNQQTLKFSVAGPSNMAVQGRNYIPGPSYRQQRVSTTVTQNNNSEFAWPGASSWALNGRNSLMNPGPAMASHKEGEDRFFPLSGSLIFGKQGTGRDNVDADKVMITNEEEIKTTNPVATESYGQVATNHQSARAQAQTGWVQTQGILPGMVWQDRDVYLQGPIWAKIPHTDGNFHPSPLMGGFGMKHPPPQILIKNTPVPADPPTAFNKGKLNSFITQYSTGQVSVEIEWELQKENSKRWNPEIQYTSNYYKSNNVEFAVNTEGVYSEPRPIGTRYLTRNL

SEQ ID NO: 491 - DNA, 2208 bp, synthetic construct
  misc_feature 1..2208: note = Adeno Associated Virus Capsid Protein Variant
  source 1..2208: mol_type = other DNA
atggctgccgatggttatcttccagattggctcgaggacaaccttagtgaaggaattcgcgagtggtgggctttgaaacctggagcccctcaacccaaggcaaatcaacaacatcaagacaacgctcgaggtcttgtgcttccgggttacaaataccttggacccggcaacggactcgacaagggggagccggtcaacgcagcagacgcggcggccctcgagcacgacaaggcctacgaccagcagctcaaggccggagacaacccgtacctcaagtacaaccacgccgacgccgagttccaggagcggctcaaagaagatacgtcttttgggggcaacctcgggcgagcagtcttccaggccaaaaagaggcttcttgaacctcttggtctggttgaggaagcggctaagacggctcctggaaagaagaggcctgtagagcagtctcctcaggaaccggactccggggcgggtattggcaaatcgggtgcacagcccgctaaaaagagactcaatttcggtcagactggcgacacagagtcagtcccagaccctcaaccaatcggagaacctcccgcagccccctcaggtgtgggatctcttacaatggcttcaggtggtggcgcaccagtggcagacaataacgaaggtgccgatggagtgggtagttcctcgggaaattggcattgcgattcccaatggctgggggacagagtcatcaccaccagcacccgaacctgggccctgcccacctacaacaatcacctctacaagcaaatctccaacagcacatctggaggatcttcaaatgacaacgcctacttcggctacagcaccccctgggggtattttgacttcaacagattccactgccacttctcaccacgtgactggcagcgactcatcaacaacaactggggattccggcctaagcgactcaacttcaagctcttcaacattcaggtcaaagaggttacggacaacaatggagtcaagaccatcgccaataaccttaccagcacggtccaggtcttcacggactcagactatcagctcccgtacgtgctcgggtcggctcacgagggctgcctcccgccgttcccagcggacgttttcatgattcctcagtacgggtatctgacgcttaatgatggaagccaggccgtgggtcgttcgtccttttactgcctggaatatttcccgtcgcaaatgctaagaacgggtaacaacttccagttcagctacgagtttgagaacgtacctttccatagcagctacgctcacagccaaagcctggaccgactaatgaatccactcatcgaccaatacttgtactatctctcaaagactattaacggttctggacagaatcaacaaacgctaaaattcagtgtggccggacccagcaacatggctgtccagggaagaaactacatacctggacccagctaccgacaacaacgtgtctcaaccactgtgactcaaaacaacaacagcgaatttgcttggcctggagcttcttcttgggctctcaatggacgtaatagcttgatgaatcctggacctgctatggccagccacaaagaaggagaggaccgtttctttcctttgtctggatctttaatttttggcaaacaaggaactggaagagacaacgtggatgcggacaaagtcatgataaccaacgaagaagaaattaaaactactaacccggtagcaacggagtcctatggacaagtggccacaaaccaccagagtgcccgggcacaggcgcagaccggctgggttcaaaaccaaggaatacttccgggtatggtttggcaggacagagatgtgtacctgcaaggacccatttgggccaaaattcctcacacggacggcaactttcacccttctccgctgatgggagggtttggaatgaagcacccgcctcctcagatcctcatcaaaaacacacctgtacctgcggatcctccaacggccttcaacaagggcaagctgaactctttcatcacccagtattctactggccaagtcagcgtggagatcgagtgggagctgcagaaggaaaacagcaagcgctggaacccggagatccagtacacttccaactattacaagtctaataatgttgaatttgctgttaatactgaaggtgtatatagtgaaccccgccccattggcaccagatacctgactcgtaatctg

SEQ ID NO: 492 - protein, 736 aa, synthetic construct
  REGION 1..736: note = Adeno Associated Virus Capsid Protein Variant
MAADGYLPDWLEDNLSEGIREWWALKPGAPQPKANQQHQDNARGLVLPGYKYLGPGNGLDKGEPVNAADAAALEHDKAYDQQLKAGDNPYLKYNHADAEFQERLKEDTSFGGNLGRAVFQAKKRLLEPLGLVEEAAKTAPGKKRPVEQSPQEPDSGAGIGKSGAQPAKKRLNFGQTGDTESVPDPQPIGEPPAAPSGVGSLTMASGGGAPVADNNEGADGVGSSSGNWHCDSQWLGDRVITTSTRTWALPTYNNHLYKQISNSTSGGSSNDNAYFGYSTPWGYFDFNRFHCHFSPRDWQRLINNNWGFRPKRLNFKLFNIQVKEVTDNNGVKTIANNLTSTVQVFTDSDYQLPYVLGSAHEGCLPPFPADVFMIPQYGYLTLNDGSQAVGRSSFYCLEYFPSQMLRTGNNFQFSYEFENVPFHSSYAHSQSLDRLMNPLIDQYLYYLSKTINGSGQNQQTLKFSVAGPSNMAVQGRNYIPGPSYRQQRVSTTVTQNNNSEFAWPGASSWALNGRNSLMNPGPAMASHKEGEDRFFPLSGSLIFGKQGTGRDNVDADKVMITNEEEIKTTNPVATESYGQVATNHQSARAQAQTGWVQNQGILPGMVWQDRDVYLQGPIWAKIPHTDGNFHPSPLMGGFGMKHPPPQILIKNTPVPADPPTAFNKGKLNSFITQYSTGQVSVEIEWELQKENSKRWNPEIQYTSNYYKSNNVEFAVNTEGVYSEPRPIGTRYLTRNL

SEQ ID NO: 493 - DNA, 2208 bp, synthetic construct
  misc_feature 1..2208: note = Adeno Associated Virus Capsid Protein Variant
  source 1..2208: mol_type = other DNA
atggctgccgatggttatcttccagattggctcgaggacaaccttagtgaaggaattcgcgagtggtgggagttgaaacctggagcccctcaacccaaggcaaatcaacaacatcaagacaacgctcgaggtcttgtgcttccgggttacaaataccttggacccggcaacggactcgacaagggggagccggtcaacgcagcagacgcggcggccctcgagcacgacaaggcctacgaccagcagctcaaggccggagacaacccgtacctcaagtacaaccacgccgacgccgagttccaggagcggctcaaagaagatacgtcttttgggggcaacctcgggcgagcagtcttccaggccaaaaagaggcttcttgaacctcttggtctggttgaggaagcggctaagacggctcctggaaagaagaggcctgtagagcagtctcctcaggaaccggactcctccgcgggtattggcaaatcgggtgcacagcccgctaaaaagagactcaatttcggtcagactggcgacacagagtcagtcccagaccctcaaccaatcggagaacctcccgcagccccctcaggtgtgggatctcttacaatggcttcaggtggtggcgcaccagtggcagacaataacgaaggtgccgatggagtgggtagttcctcgggaaattggcattgcgattcccaatggctgggggacagagtcatcaccaccagcacccgaacctgggccctgcccacctacaacaatcacctctacaagcaaatctccaacagcacatctggaggatcttcaaatgacaacgcctacttcggctacagcaccccctgggggtattttgacttcaacagattccactgccacttctcaccacgtgactggcagcgactcatcaacaacaactggggattccggcctaagcgactcaacttcaagctcttcaacattcaggtcaaagaggttacggacaacaatggagtcaagaccatcgccaataaccttaccagcacggtccaggtcttcacggactcagactatcagctcccgtacgtgctcgggtcggctcacgagggctgcctcccgccgttcccagcggacgttttcatgattcctcagtacgggtatctgacgcttaatgatggaagccaggccgtgggtcgttcgtccttttactgcctggaatatttcccgtcgcaaatgctaagaacgggtaacaacttccagttcagctacgagtttgagaacgtacctttccatagcagctacgctcacagccaaagcctggaccgactaatgaatccactcatcgaccaatacttgtactatctctcaaagactattaacggttctggacagaatcaacaaacgctaaaattcagtgtggccggacccagcaacatggctgtccagggaagaaactacatacctggacccagctaccgacaacaacgtgtctcaaccactgtgactcaaaacaacaacagcgaatttgcttggcctggagcttcttcttgggctctcaatggacgtaatagcttgatgaatcctggacctgctatggccagccacaaagaaggagaggaccgtttctttcctttgtctggatctttaatttttggcaaacaaggaactggaagagacaacgtggatgcggacaaagtcatgataaccaacgaagaagaaattaaaactactaacccggtagcaacggagtcctatggacaagtggccacaaaccaccagagtgcccgggcacaggcgcagaccggctgggttcaaaaccaaggaatacttccgggtatggtttggcaggacagagatgtgtacctgcaaggacccatttgggccaaaattcctcacacggacggcaactttcacccttctccgctgatgggagggtttggaatgaagcacccgcctcctcagatcctcatcaaaaacacacctgtacctgcggatcctccaacggccttcaacaagggcaagctgaactctttcatcacccagtattctactggccaagtcagcgtggagatcgagtgggagctgcagaaggaaaacagcaagcgctggaacccggagatccagtacacttccaactattacaagtctaataatgttgaatttgctgttaatactgaaggtgtatatagtgaaccccgccccattggcaccagatacctgactcgtaatctg

SEQ ID NO: 494 - protein, 736 aa, synthetic construct
  REGION 1..736: note = Adeno Associated Virus Capsid Protein Variant
MAADGYLPDWLEDNLSEGIREWWELKPGAPQPKANQQHQDNARGLVLPGYKYLGPGNGLDKGEPVNAADAAALEHDKAYDQQLKAGDNPYLKYNHADAEFQERLKEDTSFGGNLGRAVFQAKKRLLEPLGLVEEAAKTAPGKKRPVEQSPQEPDSSAGIGKSGAQPAKKRLNFGQTGDTESVPDPQPIGEPPAAPSGVGSLTMASGGGAPVADNNEGADGVGSSSGNWHCDSQWLGDRVITTSTRTWALPTYNNHLYKQISNSTSGGSSNDNAYFGYSTPWGYFDFNRFHCHFSPRDWQRLINNNWGFRPKRLNFKLFNIQVKEVTDNNGVKTIANNLTSTVQVFTDSDYQLPYVLGSAHEGCLPPFPADVFMIPQYGYLTLNDGSQAVGRSSFYCLEYFPSQMLRTGNNFQFSYEFENVPFHSSYAHSQSLDRLMNPLIDQYLYYLSKTINGSGQNQQTLKFSVAGPSNMAVQGRNYIPGPSYRQQRVSTTVTQNNNSEFAWPGASSWALNGRNSLMNPGPAMASHKEGEDRFFPLSGSLIFGKQGTGRDNVDADKVMITNEEEIKTTNPVATESYGQVATNHQSARAQAQTGWVQNQGILPGMVWQDRDVYLQGPIWAKIPHTDGNFHPSPLMGGFGMKHPPPQILIKNTPVPADPPTAFNKGKLNSFITQYSTGQVSVEIEWELQKENSKRWNPEIQYTSNYYKSNNVEFAVNTEGVYSEPRPIGTRYLTRNL

SEQ ID NO: 495 - DNA, 2208 bp, synthetic construct
  misc_feature 1..2208: note = Adeno Associated Virus Capsid Protein Variant
  source 1..2208: mol_type = other DNA
atggctgccgatggttatcttccagattggctcgaggacaaccttagtgaaggaattcgcgagtggtgggctttgaaacctggagcccctcaacccaaggcaaatcaacaacatcaagacaacgctcgaggtcttgtgcttccgggttacaaataccttggacccggcaacggactcgacaagggggagccggtcaacgcagcagacgcggcggccctcgagcacgacaaggcctacgaccagcagctcaaggccggagacaacccgtacctcaagtacaaccacgccgacgccgagttccaggagcggctcaaagaagatacgtcttttgggggcaacctcgggcgagcagtcttccaggccaaaaagaggcttcttgaacctcttggtctggttgaggaagcggctaagacggctcctggaaagaagaggcctgtagagcagtctcctcaggaaccggactcctccgcgggtattggcaaatcgggtgcacagcccgctaaaaagagactcaatttcggtcagactggcgacacagagtcagtcccagaccctcaaccaatcggagaacctcccgcagccccctcaggtgtgggatctcttacaatggcttcaggtggtggcgcaccagtggcagacaataacgaaggtgccgatggagtgggtagttcctcgggaaattggcattgcgattcccaatggctgggggacagagtcatcaccaccagcacccgaacctgggccctgcccacctacaacaatcacctctacaagcaaatctccaacagcacatctggaggatcttcaaatgacaacgcctacttcggctacagcaccccctgggggtattttgacttcaacagattccactgccacttctcaccacgtgactggcagcgactcatcaacaacaactggggattccggcctaagcgactcaacttcaagctcttcaacattcaggtcaaagaggttacggacaacaatggagtcaagaccatcgccaataaccttaccagcacggtccaggtcttcacggactcagactatcagctcccgtacgtgctcgggtcggctcacgagggctgcctcccgccgttcccagcggacgttttcatgattcctcagtacgggtatctgacgcttaatgatggaagccaggccgtgggtcgttcgtccttttactgcctggaatatttcccgtcgcaaatgctaagaacgggtaacaacttccagttcagctacgagtttgagaacgtacctttccatagcagctacgctcacagccaaagcctggaccgactaatgaatccactcatcgaccaatacttgtactatctctcaaagactattaacggttctggacagaatcaacaaacgctagcgttcagtgtggccggacccagcaacatggctgtccagggaagaaactacatacctggacccagctaccgacaacaacgtgtctcaaccactgtgactcaaaacaacaacagcgaatttgcttggcctggagcttcttcttgggctctcaatggacgtaatagcttgatgaatcctggacctgctatggccagccacaaagaaggagaggaccgtttctttcctttgtctggatctttaatttttggcaaacaaggaactggaagagacaacgtggatgcggacaaagtcatgataaccaacgaagaagaaattaaaactactaacccggtagcaacggagtcctatggacaagtggccacaaaccaccagagtgcccgggcacaggcgcagaccggctgggttcaaaaccaaggaatacttccgggtatggtttggcaggacagagatgtgtacctgcaaggacccatttgggccaaaattcctcacacggacggcaactttcacccttctccgctgatgggagggtttggaatgaagcacccgcctcctcagatcctcatcaaaaacacacctgtacctgcggatcctccaacggccttcaacaagggcaagctgaactctttcatcacccagtattctactggccaagtcagcgtggagatcgagtgggagctgcagaaggaaaacagcaagcgctggaacccggagatccagtacacttccaactattacaagtctaataatgttgaatttgctgttaatactgaaggtgtatatagtgaaccccgccccattggcaccagatacctgactcgtaatctg

SEQ ID NO: 496 - protein, 736 aa, synthetic construct
  REGION 1..736: note = Adeno Associated Virus Capsid Protein Variant
MAADGYLPDWLEDNLSEGIREWWALKPGAPQPKANQQHQDNARGLVLPGYKYLGPGNGLDKGEPVNAADAAALEHDKAYDQQLKAGDNPYLKYNHADAEFQERLKEDTSFGGNLGRAVFQAKKRLLEPLGLVEEAAKTAPGKKRPVEQSPQEPDSSAGIGKSGAQPAKKRLNFGQTGDTESVPDPQPIGEPPAAPSGVGSLTMASGGGAPVADNNEGADGVGSSSGNWHCDSQWLGDRVITTSTRTWALPTYNNHLYKQISNSTSGGSSNDNAYFGYSTPWGYFDFNRFHCHFSPRDWQRLINNNWGFRPKRLNFKLFNIQVKEVTDNNGVKTIANNLTSTVQVFTDSDYQLPYVLGSAHEGCLPPFPADVFMIPQYGYLTLNDGSQAVGRSSFYCLEYFPSQMLRTGNNFQFSYEFENVPFHSSYAHSQSLDRLMNPLIDQYLYYLSKTINGSGQNQQTLAFSVAGPSNMAVQGRNYIPGPSYRQQRVSTTVTQNNNSEFAWPGASSWALNGRNSLMNPGPAMASHKEGEDRFFPLSGSLIFGKQGTGRDNVDADKVMITNEEEIKTTNPVATESYGQVATNHQSARAQAQTGWVQNQGILPGMVWQDRDVYLQGPIWAKIPHTDGNFHPSPLMGGFGMKHPPPQILIKNTPVPADPPTAFNKGKLNSFITQYSTGQVSVEIEWELQKENSKRWNPEIQYTSNYYKSNNVEFAVNTEGVYSEPRPIGTRYLTRNL

SEQ ID NO: 497 - DNA, 2208 bp, synthetic construct
  misc_feature 1..2208: note = Adeno Associated Virus Capsid Protein Variant
  source 1..2208: mol_type = other DNA
atggctgccgatggttatcttccagattggctcgaggacaaccttagtgaaggaattcgcgagtggtggacgttgaaacctggagcccctcaacccaaggcaaatcaacaacatcaagacaacgctcgaggtcttgtgcttccgggttacaaataccttggacccggcaacggactcgacaagggggagccggtcaacgcagcagacgcggcggccctcgagcacgacaaggcctacgaccagcagctcaaggccggagacaacccgtacctcaagtacaaccacgccgacgccgagttccaggagcggctcaaagaagatacgtcttttgggggcaacctcgggcgagcagtcttccaggccaaaaagaggcttcttgaacctcttggtctggttgaggaagcggctaagacggctcctggaaagaagaggcctgtagagcagtctcctcaggaaccggactcctccgcgggtattggcaaatcgggtgcacagcccgctaaaaagagactcaatttcggtcagactggcgacacagagtcagtcccagaccctcaaccaatcggagaacctcccgcagccccctcaggtgtgggatctcttacaatggcttcaggtggtggcgcaccagtggcagacaataacgaaggtgccgatggagtgggtagttcctcgggaaattggcattgcgattcccaatggctgggggacagagtcatcaccaccagcacccgaacctgggccctgcccacctacaacaatcacctctacaagcaaatctccaacagcacatctggaggatcttcaaatgacaacgcctacttcggctacagcaccccctgggggtattttgacttcaacagattccactgccacttctcaccacgtgactggcagcgactcatcaacaacaactggggattccggcctaagcgactcaacttcaagctcttcaacattcaggtcaaagaggttacggacaacaatggagtcaagaccatcgccaataaccttaccagcacggtccaggtcttcacggactcagactatcagctcccgtacgtgctcgggtcggctcacgagggctgcctcccgccgttcccagcggacgttttcatgattcctcagtacgggtatctgacgcttaatgatggaagccaggccgtgggtcgttcgtccttttactgcctggaatatttcccgtcgcaaatgctaagaacgggtaacaacttccagttcagctacgagtttgagaacgtacctttccatagcagctacgctcacagccaaagcctggaccgactaatgaatccactcatcgaccaatacttgtactatctctcaaagactattaacggttctggacagaatcaacaaacgctaaaattcagtgtggccggacccagcaacatggctgtccagggaagaaactacatacctggacccagctaccgacaacaacgtgtctcaaccactgtgactcaaaacaacaacagcgaatttgcttggcctggagcttcttcttgggctctcaatggacgtaatagcttgatgaatcctggacctgctatggccagccacaaagaaggagaggaccgtttctttcctttgtctggatctttaatttttggcaaacaaggaactggaagagacaacgtggatgcggacaaagtcatgataaccaacgaagaagaaattaaaactactaacccggtagcaacggagtcctatggacaagtggccacaaaccaccagagtgcccgggcacaggcgcagaccggctgggttcaaaaccaaggaatacttccgggtatggtttggcaggacagagatgtgtacctgcaaggacccatttgggccaaaattcctcacacggacggcaactttcacccttctccgctgatgggagggtttggaatgaagcacccgcctcctcagatcctcatcaaaaacacacctgtacctgcggatcctccaacggccttcaacaagggcaagctgaactctttcatcacccagtattctactggccaagtcagcgtggagatcgagtgggagctgcagaaggaaaacagcaagcgctggaacccggagatccagtacacttccaactattacaagtctaataatgttgaatttgctgttaatactgaaggtgtatatagtgaaccccgccccattggcaccagatacctgactcgtaatctg

SEQ ID NO: 498 - protein, 736 aa, synthetic construct
  REGION 1..736: note = Adeno Associated Virus Capsid Protein Variant
MAADGYLPDWLEDNLSEGIREWWTLKPGAPQPKANQQHQDNARGLVLPGYKYLGPGNGLDKGEPVNAADAAALEHDKAYDQQLKAGDNPYLKYNHADAEFQERLKEDTSFGGNLGRAVFQAKKRLLEPLGLVEEAAKTAPGKKRPVEQSPQEPDSSAGIGKSGAQPAKKRLNFGQTGDTESVPDPQPIGEPPAAPSGVGSLTMASGGGAPVADNNEGADGVGSSSGNWHCDSQWLGDRVITTSTRTWALPTYNNHLYKQISNSTSGGSSNDNAYFGYSTPWGYFDFNRFHCHFSPRDWQRLINNNWGFRPKRLNFKLFNIQVKEVTDNNGVKTIANNLTSTVQVFTDSDYQLPYVLGSAHEGCLPPFPADVFMIPQYGYLTLNDGSQAVGRSSFYCLEYFPSQMLRTGNNFQFSYEFENVPFHSSYAHSQSLDRLMNPLIDQYLYYLSKTINGSGQNQQTLKFSVAGPSNMAVQGRNYIPGPSYRQQRVSTTVTQNNNSEFAWPGASSWALNGRNSLMNPGPAMASHKEGEDRFFPLSGSLIFGKQGTGRDNVDADKVMITNEEEIKTTNPVATESYGQVATNHQSARAQAQTGWVQNQGILPGMVWQDRDVYLQGPIWAKIPHTDGNFHPSPLMGGFGMKHPPPQILIKNTPVPADPPTAFNKGKLNSFITQYSTGQVSVEIEWELQKENSKRWNPEIQYTSNYYKSNNVEFAVNTEGVYSEPRPIGTRYLTRNL

SEQ ID NO: 499 - DNA, 2208 bp, synthetic construct
  misc_feature 1..2208: note = Adeno Associated Virus Capsid Protein Variant
  source 1..2208: mol_type = other DNA
atggctgccgatggttatcttccagattggctcgaggacaaccttagtgaaggaattcgcgagtggtgggctttgaaacctggagcccctcaacccaaggcaaatcaacaacatcaagacaacgctcgaggtcttgtgcttccgggttacaaataccttggacccggcaacggactcgacaagggggagccggtcaacgcagcagacgcggcggccctcgagcacgacaaggcctacgaccagcagctcaaggccggagacaacccgtacctcaagtacaaccacgccgacgccgagttccaggagcggctcaaagaagatacgtcttttgggggcaacctcgggcgagcagtcttccaggccaaaaagaggcttcttgaacctcttggtctggttgaggaagcggctaagacggctcctggaaagaagaggcctgtagagcagtctcctcaggaaccggactcctccgcgggtattggcaaatcgggtgcacagcccgctaaaaagagactcaatttcggtcagactggcgacacagagtcagtcccagaccctcaaccaatcggagaacctcccgcagccccctcaggtgtgggatctcttacaatggcttcaggtggtggcgcaccagtggcagacaataacgaaggtgccgatggagtgggtagttcctcgggaaattggcattgcgattcccaatggctgggggacagagtcatcaccaccagcacccgaacctgggccctgcccacctacaacaatcacctctacaagcaaatctccaacagcacatctggaggatcttcaaatgacaacgcctacttcggctacagcaccccctgggggtattttgacttcaacagattccactgccacttctcaccacgtgactggcagcgactcatcaacaacaactggggattccggcctaagcgactcaacttcaagctcttcaacattcaggtcaaagaggttacggacaacaatggagtcaagaccatcgccaataaccttaccagcacggtccaggtcttcacggactcagactatcagctcccgtacgtgctcgggtcggctcacgagggctgcctcccgccgttcccagcggacgttttcatgattcctcagtacgggtatctgacgcttaatgatggaagccaggccgtgggtcgttcgtccttttactgcctggaatatttcccgtcgcaaatgctaagaacgggtaacaacttccagttcagctacgagtttgagaacgtacctttccatagcagctacgctcacagccaaagcctggaccgactaatgaatccactcatcgaccaatacttgtactatctctcaaagactattaacggttctggacagaatcaacaaacgctaaaattcagtgtggccggacccagcaacatggctgtccagggaagaaactacatacctggacccagctaccgacaacaacgtgtctcaaccactgtgactcaaaacaacaacagcgaatttgcttggcctggagcttcttcttgggctctcaatggacgtaatagcttgatgaatcctggacctgctatggccagccacaaagaaggagaggaccgtttctttcctttgtctggatctttaatttttggcaaacaaggaactggaagagacaacgtggatgcggacaaagtcatgataaccaacgaagaagaaattaaaactactaacccggtagcaacggagtcctatggacaagtggccacaaaccaccagagtgcccgggcacaggcgcagaccggcggggttcaaaaccaaggaatacttccgggtatggtttggcaggacagagatgtgtacctgcaaggacccatttgggccaaaattcctcacacggacggcaactttcacccttctccgctgatgggagggtttggaatgaagcacccgcctcctcagatcctcatcaaaaacacacctgtacctgcggatcctccaacggccttcaacaagggcaagctgaactctttcatcacccagtattctactggccaagtcagcgtggagatcgagtgggagctgcagaaggaaaacagcaagcgctggaacccggagatccagtacacttccaactattacaagtctaataatgttgaatttgctgttaatactgaaggtgtatatagtgaaccccgccccattggcaccagatacctgactcgtaatctg

SEQ ID NO: 500 - protein, 736 aa, synthetic construct
  REGION 1..736: note = Adeno Associated Virus Capsid Protein Variant
MAADGYLPDWLEDNLSEGIREWWALKPGAPQPKANQQHQDNARGLVLPGYKYLGPGNGLDKGEPVNAADAAALEHDKAYDQQLKAGDNPYLKYNHADAEFQERLKEDTSFGGNLGRAVFQAKKRLLEPLGLVEEAAKTAPGKKRPVEQSPQEPDSSAGIGKSGAQPAKKRLNFGQTGDTESVPDPQPIGEPPAAPSGVGSLTMASGGGAPVADNNEGADGVGSSSGNWHCDSQWLGDRVITTSTRTWALPTYNNHLYKQISNSTSGGSSNDNAYFGYSTPWGYFDFNRFHCHFSPRDWQRLINNNWGFRPKRLNFKLFNIQVKEVTDNNGVKTIANNLTSTVQVFTDSDYQLPYVLGSAHEGCLPPFPADVFMIPQYGYLTLNDGSQAVGRSSFYCLEYFPSQMLRTGNNFQFSYEFENVPFHSSYAHSQSLDRLMNPLIDQYLYYLSKTINGSGQNQQTLKFSVAGPSNMAVQGRNYIPGPSYRQQRVSTTVTQNNNSEFAWPGASSWALNGRNSLMNPGPAMASHKEGEDRFFPLSGSLIFGKQGTGRDNVDADKVMITNEEEIKTTNPVATESYGQVATNHQSARAQAQTGGVQNQGILPGMVWQDRDVYLQGPIWAKIPHTDGNFHPSPLMGGFGMKHPPPQILIKNTPVPADPPTAFNKGKLNSFITQYSTGQVSVEIEWELQKENSKRWNPEIQYTSNYYKSNNVEFAVNTEGVYSEPRPIGTRYLTRNL

SEQ ID NO: 501 - DNA, 2208 bp, synthetic construct
  misc_feature 1..2208: note = Adeno Associated Virus Capsid Protein Variant
  source 1..2208: mol_type = other DNA
atggctgccgatggttatcttccagattggctcgaggacaaccttagtgaaggaattcgcgagtggtgggctttgaaacctggagcccctcaacccaaggcaaatcaacaacatcaagacaacgctcgaggtcttgtgcttccgggttacaaataccttggacccggcaacggactcgacaagggggagccggtcaacgcagcagacgcggcggccctcgagcacgacaaggcctacgaccagcagctcaaggccggagacaacccgtacctcaagtacaaccacgccgacgccgagttccaggagcggctcaaagaagatacgtcttttgggggcaacctcgggcgagcagtcttccaggccaaaaagaggcttcttgaacctcttggtctggttgaggaagcggctaagacggctcctggaaagaagaggcctgtagagcagtctcctcaggaaccggactcctccgcgggtattggcaaatcgggtgcacagcccgctaaaaagagactcaatttcggtcagactggcgacacagagtcagtcccagaccctcaaccaatcggagaacctcccgcagccccctcaggtgtgggatctcttacaatggcttcaggtggtggcgcaccagtggcagacaataacgaaggtgccgatggagtgggtagttcctcgggaaattggcattgcgattcccaatggctgggggacagagtcatcaccaccagcacccgaacctgggccctgcccacctacaacaatcacctctacaagcaaatctccaacagcacatctggaggatcttcaaatgacaacgcctacttcggctacagcaccccctgggggtattttgacttcaacagattccactgccacttctcaccacgtgactggcagcgactcatcaacaacaactggggattccggcctaagcgactcaacttcaagctcttcaacattcaggtcaaagaggttacggacaacaatggagtcaagaccatcgccaataaccttaccagcacggtccaggtcttcacggactcagactatcagctcccgtacgtgctcgggtcggctcacgagggctgcctcccgccgttcccagcggacgttttcatgattcctcagtacgggtatctgacgcttaatgatggaagccaggccgtgggtcgttcgtccttttactgcctggaatatttcccgtcgcaaatgctaagaacgggtaacaacttccagttccagtacgagtttgagaacgtacctttccatagcagctacgctcacagccaaagcctggaccgactaatgaatccactcatcgaccaatacttgtactatctctcaaagactattaacggttctggacagaatcaacaaacgctaaaattcagtgtggccggacccagcaacatggctgtccagggaagaaactacatacctggacccagctaccgacaacaacgtgtctcaaccactgtgactcaaaacaacaacagcgaatttgcttggcctggagcttcttcttgggctctcaatggacgtaatagcttgatgaatcctggacctgctatggccagccacaaagaaggagaggaccgtttctttcctttgtctggatctttaatttttggcaaacaaggaactggaagagacaacgtggatgcggacaaagtcatgataaccaacgaagaagaaattaaaactactaacccggtagcaacggagtcctatggacaagtggccacaaaccaccagagtgcccgggcacaggcgcagaccggctgggttcaaaaccaaggaatacttccgggtatggtttggcaggacagagatgtgtacctgcaaggacccatttgggccaaaattcctcacacggacggcaactttcacccttctccgctgatgggagggtttggaatgaagcacccgcctcctcagatcctcatcaaaaacacacctgtacctgcggatcctccaacggccttcaacaagggcaagctgaactctttcatcacccagtattctactggccaagtcagcgtggagatcgagtgggagctgcagaaggaaaacagcaagcgctggaacccggagatccagtacacttccaactattacaagtctaataatgttgaatttgctgttaatactgaaggtgtatatagtgaaccccgccccattggcaccagatacctgactcgtaatctg

SEQ ID NO: 502 - protein, 736 aa, synthetic construct
  REGION 1..736: note = Adeno Associated Virus Capsid Protein Variant
MAADGYLPDWLEDNLSEGIREWWALKPGAPQPKANQQHQDNARGLVLPGYKYLGPGNGLDKGEPVNAADAAALEHDKAYDQQLKAGDNPYLKYNHADAEFQERLKEDTSFGGNLGRAVFQAKKRLLEPLGLVEEAAKTAPGKKRPVEQSPQEPDSSAGIGKSGAQPAKKRLNFGQTGDTESVPDPQPIGEPPAAPSGVGSLTMASGGGAPVADNNEGADGVGSSSGNWHCDSQWLGDRVITTSTRTWALPTYNNHLYKQISNSTSGGSSNDNAYFGYSTPWGYFDFNRFHCHFSPRDWQRLINNNWGFRPKRLNFKLFNIQVKEVTDNNGVKTIANNLTSTVQVFTDSDYQLPYVLGSAHEGCLPPFPADVFMIPQYGYLTLNDGSQAVGRSSFYCLEYFPSQMLRTGNNFQFQYEFENVPFHSSYAHSQSLDRLMNPLIDQYLYYLSKTINGSGQNQQTLKFSVAGPSNMAVQGRNYIPGPSYRQQRVSTTVTQNNNSEFAWPGASSWALNGRNSLMNPGPAMASHKEGEDRFFPLSGSLIFGKQGTGRDNVDADKVMITNEEEIKTTNPVATESYGQVATNHQSARAQAQTGWVQNQGILPGMVWQDRDVYLQGPIWAKIPHTDGNFHPSPLMGGFGMKHPPPQILIKNTPVPADPPTAFNKGKLNSFITQYSTGQVSVEIEWELQKENSKRWNPEIQYTSNYYKSNNVEFAVNTEGVYSEPRPIGTRYLTRNL

SEQ ID NO: 503 - DNA, 2208 bp, synthetic construct
  misc_feature 1..2208: note = Adeno Associated Virus Capsid Protein Variant
  source 1..2208: mol_type = other DNA
atggctgccgatggttatcttccagattggctcgaggacaaccttagtgaaggaattcgcgagtggtgggctttgaaacctggagcccctcaacccaaggcaaatcaacaacatcaagacaacgctcgaggtcttgtgcttccgggttacaaataccttggacccggcaacggactcgacaagggggagccggtcaacgcagcagacgcggcggccctcgagcacgacaaggcctacgaccagcagctcaaggccggagacaacccgtacctcaagtacaaccacgccgacgccgagttccaggagcggctcaaagaagatacgtcttttgggggcaacctcgggcgagcagtcttccaggccaaaaagaggcttcttgaacctcttggtctggttgaggaagcggctaagacggctcctggaaagaagaggcctgtagagcagtctcctcaggaaccggactcctccgcgggtattggcaaatcgggtgcacagcccgctaaaaagagactcaatttcggtcagactggcgacacagagtcagtcccagaccctcaaccaatcggagaacctcccgcagccccctcaggtgtgggatctcttacaatggcttcaggtggtggcgcaccagtggcagacaataacgaaggtgccgatggagtgggtagttcctcgggaaattggcattgcgattcccaatggctgggggacagagtcatcaccaccagcacccgaacctgggccctgcccacctacaacaatcacctctacaagcaaatctccaacagcacatctggaggatcttcaaatgacaacgcctacttcggctacagcaccccctgggggtattttgacttcaacagattccactgccacttctcaccacgtgactggcagcgactcatcaacaacaactggggattccggcctaagcgactcaacttcaagctcttcaacattcaggtcaaagaggttacggacaacaatggagtcaagaccatcgccaataaccttaccagcacggtccaggtcttcacggactcagactatcagctcccgtacgtgctcgggtcggctcacgagggctgcctcccgccgttcccagcggacgttttcatgattcctcagtacgggtatctgacgcttaatgatggaagccaggccgtgggtcgttcgtccttttactgcctggaatatttcccgtcgcaaatgctaagaacgggtaacaacttccagttcagctacgagtttgagaacgtacctttccatagcagctacgctcacagccaaagcctggaccgactaatgaatccactcatcgaccaatacttgtactatctctcaaagactattaacggttctggacagaatcaacaaacgctaaaattcagtgtggccggacccagcaacatggctgtccagggaagaaactacatacctggacccagctactctcaacaacgtgtctcaaccactgtgactcaaaacaacaacagcgaatttgcttggcctggagcttcttcttgggctctcaatggacgtaatagcttgatgaatcctggacctgctatggccagccacaaagaaggagaggaccgtttctttcctttgtctggatctttaatttttggcaaacaaggaactggaagagacaacgtggatgcggacaaagtcatgataaccaacgaagaagaaattaaaactactaacccggtagcaacggagtcctatggacaagtggccacaaaccaccagagtgcccgggcacaggcgcagaccggctgggttcaaaaccaaggaatacttccgggtatggtttggcaggacagagatgtgtacctgcaaggacccatttgggccaaaattcctcacacggacggcaactttcacccttctccgctgatgggagggtttggaatgaagcacccgcctcctcagatcctcatcaaaaacacacctgtacctgcggatcctccaacggccttcaacaagggcaagctgaactctttcatcacccagtattctactggccaagtcagcgtggagatcgagtgggagctgcagaaggaaaacagcaagcgctggaacccggagatccagtacacttccaactattacaagtctaataatgttgaatttgctgttaatactgaaggtgtatatagtgaaccccgccccattggcaccagatacctgactcgtaatctg

SEQ ID NO: 504 - protein, 736 aa, synthetic construct
  REGION 1..736: note = Adeno Associated Virus Capsid Protein Variant
MAADGYLPDWLEDNLSEGIREWWALKPGAPQPKANQQHQDNARGLVLPGYKYLGPGNGLDKGEPVNAADAAALEHDKAYDQQLKAGDNPYLKYNHADAEFQERLKEDTSFGGNLGRAVFQAKKRLLEPLGLVEEAAKTAPGKKRPVEQSPQEPDSSAGIGKSGAQPAKKRLNFGQTGDTESVPDPQPIGEPPAAPSGVGSLTMASGGGAPVADNNEGADGVGSSSGNWHCDSQWLGDRVITTSTRTWALPTYNNHLYKQISNSTSGGSSNDNAYFGYSTPWGYFDFNRFHCHFSPRDWQRLINNNWGFRPKRLNFKLFNIQVKEVTDNNGVKTIANNLTSTVQVFTDSDYQLPYVLGSAHEGCLPPFPADVFMIPQYGYLTLNDGSQAVGRSSFYCLEYFPSQMLRTGNNFQFSYEFENVPFHSSYAHSQSLDRLMNPLIDQYLYYLSKTINGSGQNQQTLKFSVAGPSNMAVQGRNYIPGPSYSQQRVSTTVTQNNNSEFAWPGASSWALNGRNSLMNPGPAMASHKEGEDRFFPLSGSLIFGKQGTGRDNVDADKVMITNEEEIKTTNPVATESYGQVATNHQSARAQAQTGWVQNQGILPGMVWQDRDVYLQGPIWAKIPHTDGNFHPSPLMGGFGMKHPPPQILIKNTPVPADPPTAFNKGKLNSFITQYSTGQVSVEIEWELQKENSKRWNPEIQYTSNYYKSNNVEFAVNTEGVYSEPRPIGTRYLTRNL

SEQ ID NO: 505 - DNA, 2208 bp, synthetic construct
  misc_feature 1..2208: note = Adeno Associated Virus Capsid Protein Variant
  source 1..2208: mol_type = other DNA
atggctgccgatggttatcttccagattggctcgaggacaaccttagtgaaggaattcgcgagtggtgggctttgaaacctggagcccctcaacccaaggcaaatcaacaacatcaagacaacgctcgaggtcttgtgcttccgggttacaaataccttggacccggcaacggactcgacaagggggagccggtcaacgcagcagacgcggcggccctcgagcacgacaaggcctacgaccagcagctcaaggccggagacaacccgtacctcaagtacaaccacgccgacgccgagttccaggagcggctcaaagaagatacgtcttttgggggcaacctcgggcgagcagtcttccaggccaaaaagaggcttcttgaacctcttggtctggttgaggaagcggctaagacggctcctggaaagaagaggcctgtagagcagtctcctcaggaaccggactcctccgcgggtattggcaaagtgggtgcacagcccgctaaaaagagactcaatttcggtcagactggcgacacagagtcagtcccagaccctcaaccaatcggagaacctcccgcagccccctcaggtgtgggatctcttacaatggcttcaggtggtggcgcaccagtggcagacaataacgaaggtgccgatggagtgggtagttcctcgggaaattggcattgcgattcccaatggctgggggacagagtcatcaccaccagcacccgaacctgggccctgcccacctacaacaatcacctctacaagcaaatctccaacagcacatctggaggatcttcaaatgacaacgcctacttcggctacagcaccccctgggggtattttgacttcaacagattccactgccacttctcaccacgtgactggcagcgactcatcaacaacaactggggattccggcctaagcgactcaacttcaagctcttcaacattcaggtcaaagaggttacggacaacaatggagtcaagaccatcgccaataaccttaccagcacggtccaggtcttcacggactcagactatcagctcccgtacgtgctcgggtcggctcacgagggctgcctcccgccgttcccagcggacgttttcatgattcctcagtacgggtatctgacgcttaatgatggaagccaggccgtgggtcgttcgtccttttactgcctggaatatttcccgtcgcaaatgctaagaacgggtaacaacttccagttcagctacgagtttgagaacgtacctttccatagcagctacgctcacagccaaagcctggaccgactaatgaatccactcatcgaccaatacttgtactatctctcaaagactattaacggttctggacagaatcaacaaacgctaaaattcagtgtggccggacccagcaacatggctgtccagggaagaaactacatacctggacccagctaccgacaacaacgtgtctcaaccactgtgactcaaaacaacaacagcgaatttgcttggcctggagcttcttcttgggctctcaatggacgtaatagcttgatgaatcctggacctgctatggccagccacaaagaaggagaggaccgtttctttcctttgtctggatctttaatttttggcaaacaaggaactggaagagacaacgtggatgcggacaaagtcatgataaccaacgaagaagaaattaaaactactaacccggtagcaacggagtcctatggacaagtggccacaaaccaccagagtgcccgggcacaggcgcagaccggctgggttcaaaaccaaggaatacttccgggtatggtttggcaggacagagatgtgtacctgcaaggacccatttgggccaaaattcctcacacggacggcaactttcacccttctccgctgatgggagggtttggaatgaagcacccgcctcctcagatcctcatcaaaaacacacctgtacctgcggatcctccaacggccttcaacaagggcaagctgaactctttcatcacccagtattctactggccaagtcagcgtggagatcgagtgggagctgcagaaggaaaacagcaagcgctggaacccggagatccagtacacttccaactattacaagtctaataatgttgaatttgctgttaatactgaaggtgtatatagtgaaccccgccccattggcaccagatacctgactcgtaatctg

SEQ ID NO: 506 - protein, 736 aa, synthetic construct
  REGION 1..736: note = Adeno Associated Virus Capsid Protein Variant
MAADGYLPDWLEDNLSEGIREWWALKPGAPQPKANQQHQDNARGLVLPGYKYLGPGNGLDKGEPVNAADAAALEHDKAYDQQLKAGDNPYLKYNHADAEFQERLKEDTSFGGNLGRAVFQAKKRLLEPLGLVEEAAKTAPGKKRPVEQSPQEPDSSAGIGKVGAQPAKKRLNFGQTGDTESVPDPQPIGEPPAAPSGVGSLTMASGGGAPVADNNEGADGVGSSSGNWHCDSQWLGDRVITTSTRTWALPTYNNHLYKQISNSTSGGSSNDNAYFGYSTPWGYFDFNRFHCHFSPRDWQRLINNNWGFRPKRLNFKLFNIQVKEVTDNNGVKTIANNLTSTVQVFTDSDYQLPYVLGSAHEGCLPPFPADVFMIPQYGYLTLNDGSQAVGRSSFYCLEYFPSQMLRTGNNFQFSYEFENVPFHSSYAHSQSLDRLMNPLIDQYLYYLSKTINGSGQNQQTLKFSVAGPSNMAVQGRNYIPGPSYRQQRVSTTVTQNNNSEFAWPGASSWALNGRNSLMNPGPAMASHKEGEDRFFPLSGSLIFGKQGTGRDNVDADKVMITNEEEIKTTNPVATESYGQVATNHQSARAQAQTGWVQNQGILPGMVWQDRDVYLQGPIWAKIPHTDGNFHPSPLMGGFGMKHPPPQILIKNTPVPADPPTAFNKGKLNSFITQYSTGQVSVEIEWELQKENSKRWNPEIQYTSNYYKSNNVEFAVNTEGVYSEPRPIGTRYLTRNL

SEQ ID NO: 507 - DNA, 2208 bp, synthetic construct
  misc_feature 1..2208: note = Adeno Associated Virus Capsid Protein Variant
  source 1..2208: mol_type = other DNA
atggctgccgatggttatcttccagattggctcgaggacaaccttagtgaaggaattcgcgagtggtgggctttgaaacctggagcccctcaacccaaggcaaatcaacaacatcaagacaacgctcgaggtcttgtgcttccgggttacaaataccttggacccggcaacggactcgacaagggggagccggtcaacgcagcagacgcggcggccctcgagcacgacaaggcctacgaccagcagctcaaggccggagacaacccgtacctcaagtacaaccacgccgacgccgagttccaggagcggctcaaagaagatacgtcttttgggggcaacctcgggcgagcagtcttccaggccaaaaagaggcttcttgaacctcttggtctggttgaggaagcggctaagacggctcctggaaagaagaggcctgtagagcagtctcctcaggaaccggactcctccgcgggtattggcaaatcgggtgcacagcccgctaaaaagagactcaatttcggtcagactggcgacacagagtcagtcccagaccctcaaccaatcggagaacctcccgcagccccctcaggtgtgggatctcttacaatggcttcaggtggtggcgcaccagtggcagacaataacgaaggtgccgatggagtgggtagttcctcgggaaattggcattgcgattcccaatggctgggggacagagtcatcaccaccagcacccgaacctgggccctgcccacctacaacaatcacctctacaagcaaatctccaacagcacatctggaggatcttcaaatgacaacgcctacttcggctacagcaccccctgggggtattttgacttcaacagattccactgccacttctcaccacgtgactggcagcgactcatcaacaacaactggggattccggcctaagcgactcaacttcaagctcttcaacattcaggtcaaagaggttacggacaacaatggagtcaagaccatcgccaataaccttaccagcacggtccaggtcttcacggactcagactatcagctcccgtacgtgctcgggtcggctcacgagggctgcctcccgccgttcccagcggacgttttcatgattcctcagtacgggtatctgacgcttaatgatggaagccaggccgtgggtcgttcgtccttttactgcctggaatatttcccgtcgcaaatgctaagaacgggtaacaacttccagttcagctacgagtttgagaacgtacctttccatagcagctacgctcacagccaaagcctggaccgactaatgaatccactcatcgaccaatacttgtactatctctcaaagactattaacggttctggacagaatcaacaaacgctaaaattcagtgtggccggacccagcaacatggctgtccagggaagaaactacatacctggacccagctacctgcaacaacgtgtctcaaccactgtgactcaaaacaacaacagcgaatttgcttggcctggagcttcttcttgggctctcaatggacgtaatagcttgatgaatcctggacctgctatggccagccacaaagaaggagaggaccgtttctttcctttgtctggatctttaatttttggcaaacaaggaactggaagagacaacgtggatgcggacaaagtcatgataaccaacgaagaagaaattaaaactactaacccggtagcaacggagtcctatggacaagtggccacaaaccaccagagtgcccgggcacaggcgcagaccggctgggttcaaaaccaaggaatacttccgggtatggtttggcaggacagagatgtgtacctgcaaggacccatttgggccaaaattcctcacacggacggcaactttcacccttctccgctgatgggagggtttggaatgaagcacccgcctcctcagatcctcatcaaaaacacacctgtacctgcggatcctccaacggccttcaacaagggcaagctgaactctttcatcacccagtattctactggccaagtcagcgtggagatcgagtgggagctgcagaaggaaaacagcaagcgctggaacccggagatccagtacacttccaactattacaagtctaataatgttgaatttgctgttaatactgaaggtgtatatagtgaaccccgccccattggcaccagatacctgactcgtaatctg

SEQ ID NO: 508 - protein, 736 aa, synthetic construct
  REGION 1..736: note = Adeno Associated Virus Capsid Protein Variant
MAADGYLPDWLEDNLSEGIREWWALKPGAPQPKANQQHQDNARGLVLPGYKYLGPGNGLDKGEPVNAADAAALEHDKAYDQQLKAGDNPYLKYNHADAEFQERLKEDTSFGGNLGRAVFQAKKRLLEPLGLVEEAAKTAPGKKRPVEQSPQEPDSSAGIGKSGAQPAKKRLNFGQTGDTESVPDPQPIGEPPAAPSGVGSLTMASGGGAPVADNNEGADGVGSSSGNWHCDSQWLGDRVITTSTRTWALPTYNNHLYKQISNSTSGGSSNDNAYFGYSTPWGYFDFNRFHCHFSPRDWQRLINNNWGFRPKRLNFKLFNIQVKEVTDNNGVKTIANNLTSTVQVFTDSDYQLPYVLGSAHEGCLPPFPADVFMIPQYGYLTLNDGSQAVGRSSFYCLEYFPSQMLRTGNNFQFSYEFENVPFHSSYAHSQSLDRLMNPLIDQYLYYLSKTINGSGQNQQTLKFSVAGPSNMAVQGRNYIPGPSYLQQRVSTTVTQNNNSEFAWPGASSWALNGRNSLMNPGPAMASHKEGEDRFFPLSGSLIFGKQGTGRDNVDADKVMITNEEEIKTTNPVATESYGQVATNHQSARAQAQTGWVQNQGILPGMVWQDRDVYLQGPIWAKIPHTDGNFHPSPLMGGFGMKHPPPQILIKNTPVPADPPTAFNKGKLNSFITQYSTGQVSVEIEWELQKENSKRWNPEIQYTSNYYKSNNVEFAVNTEGVYSEPRPIGTRYLTRNL

SEQ ID NO: 509 - DNA, 2208 bp, synthetic construct
  misc_feature 1..2208: note = Adeno Associated Virus Capsid Protein Variant
  source 1..2208: mol_type = other DNA
atggctgccgatggttatcttccagattggctcgaggacaaccttagtgaaggaattcgcgagtggtgggctttgaaacctggagcccctcaacccaaggcaaatcaacaacatcaagacaacgctcgaggtcttgtgcttccgggttacaaataccttggacccggcaacggactcgacaagggggagccggtcaacgcagcagacgcggcggccctcgagcacgacaaggcctacgaccagcagctcaaggccggagacaacccgtacctcaagtacaaccacgccgacgccgagttccaggagcggctcaaagaagatacgtcttttgggggcaacctcgggcgagcagtcttccaggccaaaaagaggcttcttgaacctcttggtctggttgaggaagcggctaagacggctcctggaaagaagaggcctgtagagcagtctcctcaggaaccggactcctccgcgggtattggcaaatcgggtgcacagcccgctaaaaagagactcaatttcggtcagactggcgacacagagtcagtcccagaccctcaaccaatcggagaacctcccgcagccccctcaggtgtgggatctcttacaatggcttcaggtggtggcgcaccagtggcagacaataacgaaggtgccgatggagtgggtagttcctcgggaaattggcattgcgattcccaatggctgggggacagagtcatcaccaccagcacccgaacctgggccctgcccacctacaacaatcacctctacaagcaaatctccaacagcacatctggaggatcttcaaatgacaacgcctacttcggctacagcaccccctgggggtattttgacttcaacagattccactgccacttctcaccacgtgactggcagcgactcatcaacaacaactggggattccggcctaagcgactcaacttcaagctcttcaacattcaggtcaaagaggttacggacaacaatggagtcaagaccatcgccaataaccttaccagcacggtccaggtcttcacggactcagactatcagctcccgtacgtgctcgggtcggctcacgagggctgcctcccgccgttcccagcggacgttttcatgattcctcagtacgggtatctgacgcttaatgatggaagccaggccgtgggtcgttcgtccttttactgcctggaatatttcccgtcgcaaatgctaagaacgggtaacaacttccagttcagctacgagtttgagaacgtacctttccatagcagctacgctcacagccaaagcctggaccgactaatgaatccactcatcgaccaatacttgtactatctctcaaagactattaacggttctggacagaatcaacaaacgctaaaattcagtgtggccggacccagcaacatggctgtccagggaagaaactacatacctggacccagctaccgacaacaacgtgtctcaaccactgtgactcaaaacaacaacagcgaatttgcttggcctggagcttcttcttgggctctcaatggacgtaatagcttgatgaatcctggacctgctatggccagccacaaagaaggagaggaccgtttctttcctttgtctggatctttaatttttggcaaacaaggaactggaagagacaacgtggatgcggacaaagtcatgataaccaacgaagaagaaattaaaactactaacccggtagcaacggagtcctatggacaagtggccacaaaccaccagagtgcccgggcacaggcgcagaccggctgggttcaaaaccaaggaatacttccgggtatggtttggcaggacagagatgtgtacctgcaaggacccatttgggccaaaattcctcacacggacggcaactttcacccttctccgctgatgggagggtttggaatgaagtggccgcctcctcagatcctcatcaaaaacacacctgtacctgcggatcctccaacggccttcaacaagggcaagctgaactctttcatcacccagtattctactggccaagtcagcgtggagatcgagtgggagctgcagaaggaaaacagcaagcgctggaacccggagatccagtacacttccaactattacaagtctaataatgttgaatttgctgttaatactgaaggtgtatatagtgaaccccgccccattggcaccagatacctgactcgtaatctg

SEQ ID NO: 510 - protein, 736 aa, synthetic construct
  REGION 1..736: note = Adeno Associated Virus Capsid Protein Variant
MAADGYLPDWLEDNLSEGIREWWALKPGAPQPKANQQHQDNARGLVLPGYKYLGPGNGLDKGEPVNAADAAALEHDKAYDQQLKAGDNPYLKYNHADAEFQERLKEDTSFGGNLGRAVFQAKKRLLEPLGLVEEAAKTAPGKKRPVEQSPQEPDSSAGIGKSGAQPAKKRLNFGQTGDTESVPDPQPIGEPPAAPSGVGSLTMASGGGAPVADNNEGADGVGSSSGNWHCDSQWLGDRVITTSTRTWALPTYNNHLYKQISNSTSGGSSNDNAYFGYSTPWGYFDFNRFHCHFSPRDWQRLINNNWGFRPKRLNFKLFNIQVKEVTDNNGVKTIANNLTSTVQVFTDSDYQLPYVLGSAHEGCLPPFPADVFMIPQYGYLTLNDGSQAVGRSSFYCLEYFPSQMLRTGNNFQFSYEFENVPFHSSYAHSQSLDRLMNPLIDQYLYYLSKTINGSGQNQQTLKFSVAGPSNMAVQGRNYIPGPSYRQQRVSTTVTQNNNSEFAWPGASSWALNGRNSLMNPGPAMASHKEGEDRFFPLSGSLIFGKQGTGRDNVDADKVMITNEEEIKTTNPVATESYGQVATNHQSARAQAQTGWVQNQGILPGMVWQDRDVYLQGPIWAKIPHTDGNFHPSPLMGGFGMKWPPPQILIKNTPVPADPPTAFNKGKLNSFITQYSTGQVSVEIEWELQKENSKRWNPEIQYTSNYYKSNNVEFAVNTEGVYSEPRPIGTRYLTRNL

SEQ ID NO: 511 - DNA, 2208 bp, synthetic construct
  misc_feature 1..2208: note = Adeno Associated Virus Capsid Protein Variant
  source 1..2208: mol_type = other DNA
atggctgccgatggttatcttccagattggctcgaggacaaccttagtgaaggaattcgcgagtggtgggctttgaaacctggagcccctcaacccaaggcaaatcaacaacatcaagacaacgctcgaggtcttgtgcttccgggttacaaataccttggacccggcaacggactcgacaagggggagccggtcaacgcagcagacgcggcggccctcgagcacgacaaggcctacgaccagcagctcaaggccggagacaacccgtacctcaagtacaaccacgccgacgccgagttccaggagcggctcaaagaagatacgtcttttgggggcaacctcgggcgagcagtcttccaggccaaaaagaggcttcttgaacctcttggtctggttgaggaagcggctaagacggctcctggaaagaagaggcctgtagagcagtctcctcaggaaccggactcctccgcgggtattggcaaatcgggtgcacagcccgctaaaaagagactcaatttcggtcagactggcgacacagagtcagtcccagaccctcaaccaatcggagaacctcccgcagccccctcaggtgtgggatctcttacaatggcttcaggtggtggcgcaccagtggcagacaataacgaaggtgccgatggagtgggtagttcctcgggaaattggcattgcgattcccaatggctgggggacagagtcatcaccaccagcacccgaacctgggccctgcccacctacaacaatcacctctacaagcaaatctccaacagcacatctggaggatcttcaaatgacaacgcctacttcggctacagcaccccctgggggtattttgacttcaacagattccactgccacttctcaccacgtgactggcagcgactcatcaacaacaactggggattccggcctaagcgactcaacttcaagctcttcaacattcaggtcaaagaggttacggacaacaatggagtcaagaccatcgccaataaccttaccagcacggtccaggtcttcacggactcagactatcagctcccgtacgtgctcgggtcggctcacgagggctgcctcccgccgttcccagcggacgttttcatgattcctcagtacgggtatctgacgcttaatgatggaagccaggccgtgggtcgttcgtccttttactgcctggaatatttcccgtcgcaaatgctaagaacgggtaacaacttccagttcagctactattttgagaacgtacctttccatagcagctacgctcacagccaaagcctggaccgactaatgaatccactcatcgaccaatacttgtactatctctcaaagactattaacggttctggacagaatcaacaaacgctaaaattcagtgtggccggacccagcaacatggctgtccagggaagaaactacatacctggacccagctaccgacaacaacgtgtctcaaccactgtgactcaaaacaacaacagcgaatttgcttggcctggagcttcttcttgggctctcaatggacgtaatagcttgatgaatcctggacctgctatggccagccacaaagaaggagaggaccgtttctttcctttgtctggatctttaatttttggcaaacaaggaactggaagagacaacgtggatgcggacaaagtcatgataaccaacgaagaagaaattaaaactactaacccggtagcaacggagtcctatggacaagtggccacaaaccaccagagtgcccgggcacaggcgcagaccggctgggttcaaaaccaaggaatacttccgggtatggtttggcaggacagagatgtgtacctgcaaggacccatttgggccaaaattcctcacacggacggcaactttcacccttctccgctgatgggagggtttggaatgaagcacccgcctcctcagatcctcatcaaaaacacacctgtacctgcggatcctccaacggccttcaacaagggcaagctgaactctttcatcacccagtattctactggccaagtcagcgtggagatcgagtgggagctgcagaaggaaaacagcaagcgctggaacccggagatccagtacacttccaactattacaagtctaataatgttgaatttgctgttaatactgaaggtgtatatagtgaaccccgccccattggcaccagatacctgactcgtaatctg

SEQ ID NO: 512 - protein, 736 aa, synthetic construct
  REGION 1..736: note = Adeno Associated Virus Capsid Protein Variant
MAADGYLPDWLEDNLSEGIREWWALKPGAPQPKANQQHQDNARGLVLPGYKYLGPGNGLDKGEPVNAADAAALEHDKAYDQQLKAGDNPYLKYNHADAEFQERLKEDTSFGGNLGRAVFQAKKRLLEPLGLVEEAAKTAPGKKRPVEQSPQEPDSSAGIGKSGAQPAKKRLNFGQTGDTESVPDPQPIGEPPAAPSGVGSLTMASGGGAPVADNNEGADGVGSSSGNWHCDSQWLGDRVITTSTRTWALPTYNNHLYKQISNSTSGGSSNDNAYFGYSTPWGYFDFNRFHCHFSPRDWQRLINNNWGFRPKRLNFKLFNIQVKEVTDNNGVKTIANNLTSTVQVFTDSDYQLPYVLGSAHEGCLPPFPADVFMIPQYGYLTLNDGSQAVGRSSFYCLEYFPSQMLRTGNNFQFSYYFENVPFHSSYAHSQSLDRLMNPLIDQYLYYLSKTINGSGQNQQTLKFSVAGPSNMAVQGRNYIPGPSYRQQRVSTTVTQNNNSEFAWPGASSWALNGRNSLMNPGPAMASHKEGEDRFFPLSGSLIFGKQGTGRDNVDADKVMITNEEEIKTTNPVATESYGQVATNHQSARAQAQTGWVQNQGILPGMVWQDRDVYLQGPIWAKIPHTDGNFHPSPLMGGFGMKHPPPQILIKNTPVPADPPTAFNKGKLNSFITQYSTGQVSVEIEWELQKENSKRWNPEIQYTSNYYKSNNVEFAVNTEGVYSEPRPIGTRYLTRNL

SEQ ID NO: 513 - DNA, 2208 bp, synthetic construct
  misc_feature 1..2208: note = Adeno Associated Virus Capsid Protein Variant
  source 1..2208: mol_type = other DNA
atggctgccgatggttatcttccagattggctcgaggacaaccttagtgaaggaattcgcgagtggtgggctttgaaacctggagcccctcaacccaaggcaaatcaacaacatcaagacaacgctcgaggtcttgtgcttccgggttacaaataccttggacccggcaacggactcgacaagggggagccggtcaacgcagcagacgcggcggccctcgagcacgacaaggcctacgaccagcagctcaaggccggagacaacccgtacctcaagtacaaccacgccgacgccgagttccaggagcggctcaaagaagatacgtcttttgggggcaacctcgggcgagcagtcttccaggccaaaaagaggcttcttgaacctcttggtctggttgaggaagcggctaagacggctcctggaaagaagaggcctgtagagcagtctcctcaggaaccggactcctccgcgggtattggcaaatcgggtgcacagcccgctaaaaagagactcaatttcggtcagactggcgacacagagtcagtcccagaccctcaaccaatcggagaacctcccgcagccccctcaggtgtgggatctcttacaatggcttcaggtggtggcgcaccagtggcagacaataacgaaggtgccgatggagtgggtagttcctcgggaaattggcattgcgattcccaatggctgggggacagagtcatcaccaccagcacccgaacctgggccctgcccacctacaacaatcacctctacaagcaaatctccaacagcacatctggaggatcttcaaatgacaacgcctacttcggctacagcaccccctgggggtattttgacttcaacagattccactgccacttctcaccacgtgactggcagcgactcatcaacaacaactggggattccggcctaagcgactcaacttcaagctcttcaacattcaggtcaaagaggttacggacaacaatggagtcaagaccatcgccaataaccttaccagcacggtccaggtcttcacggactcagactatcagctcccgtacgtgctcgggtcggctcacgagggctgcctcccgccgttcccagcggacgttttcatgattcctcagtacgggtatctgacgcttaatgatggaagccaggccgtgggtcgttcgtccttttactgcctggaatatttcccgtcgcaaatgctaagaacgggtaacaacttccagttcagctacagttttgagaacgtacctttccatagcagctacgctcacagccaaagcctggaccgactaatgaatccactcatcgaccaatacttgtactatctctcaaagactattaacggttctggacagaatcaacaaacgctaaaattcagtgtggccggacccagcaacatggctgtccagggaagaaactacatacctggacccagctaccgacaacaacgtgtctcaaccactgtgactcaaaacaacaacagcgaatttgcttggcctggagcttcttcttgggctctcaatggacgtaatagcttgatgaatcctggacctgctatggccagccacaaagaaggagaggaccgtttctttcctttgtctggatctttaatttttggcaaacaaggaactggaagagacaacgtggatgcggacaaagtcatgataaccaacgaagaagaaattaaaactactaacccggtagcaacggagtcctatggacaagtggccacaaaccaccagagtgcccgggcacaggcgcagaccggctgggttcaaaaccaaggaatacttccgggtatggtttggcaggacagagatgtgtacctgcaaggacccatttgggccaaaattcctcacacggacggcaactttcacccttctccgctgatgggagggtttggaatgaagcacccgcctcctcagatcctcatcaaaaacacacctgtacctgcggatcctccaacggccttcaacaagggcaagctgaactctttcatcacccagtattctactggccaagtcagcgtggagatcgagtgggagctgcagaaggaaaacagcaagcgctggaacccggagatccagtacacttccaactattacaagtctaataatgttgaatttgctgttaatactgaaggtgtatatagtgaaccccgccccattggcaccagatacctgactcgtaatctg

SEQ ID NO: 514 - protein, 736 aa, synthetic construct
  REGION 1..736: note = Adeno Associated Virus Capsid Protein Variant
MAADGYLPDWLEDNLSEGIREWWALKPGAPQPKANQQHQDNARGLVLPGYKYLGPGNGLDKGEPVNAADAAALEHDKAYDQQLKAGDNPYLKYNHADAEFQERLKEDTSFGGNLGRAVFQAKKRLLEPLGLVEEAAKTAPGKKRPVEQSPQEPDSSAGIGKSGAQPAKKRLNFGQTGDTESVPDPQPIGEPPAAPSGVGSLTMASGGGAPVADNNEGADGVGSSSGNWHCDSQWLGDRVITTSTRTWALPTYNNHLYKQISNSTSGGSSNDNAYFGYSTPWGYFDFNRFHCHFSPRDWQRLINNNWGFRPKRLNFKLFNIQVKEVTDNNGVKTIANNLTSTVQVFTDSDYQLPYVLGSAHEGCLPPFPADVFMIPQYGYLTLNDGSQAVGRSSFYCLEYFPSQMLRTGNNFQFSYSFENVPFHSSYAHSQSLDRLMNPLIDQYLYYLSKTINGSGQNQQTLKFSVAGPSNMAVQGRNYIPGPSYRQQRVSTTVTQNNNSEFAWPGASSWALNGRNSLMNPGPAMASHKEGEDRFFPLSGSLIFGKQGTGRDNVDADKVMITNEEEIKTTNPVATESYGQVATNHQSARAQAQTGWVQNQGILPGMVWQDRDVYLQGPIWAKIPHTDGNFHPSPLMGGFGMKHPPPQILIKNTPVPADPPTAFNKGKLNSFITQYSTGQVSVEIEWELQKENSKRWNPEIQYTSNYYKSNNVEFAVNTEGVYSEPRPIGTRYLTRNL

SEQ ID NO: 515 - DNA, 2208 bp, synthetic construct
  misc_feature 1..2208: note = Adeno Associated Virus Capsid Protein Variant
  source 1..2208: mol_type = other DNA
atggctgccgatggttatcttccagattggctcgaggacaaccttagtgaaggaattcgcgagtggtgggctttgaaacctggagcccctcaacccaaggcaaatcaacaacatcaagacaacgctcgaggtcttgtgcttccgggttacaaataccttggacccggcaacggactcgacaagggggagccggtcaacgcagcagacgcggcggccctcgagcacgacaaggcctacgaccagcagctcaaggccggagacaacccgtacctcaagtacaaccacgccgacgccgagttccaggagcggctcaaagaagatacgtcttttgggggcaacctcgggcgagcagtcttccaggccaaaaagaggcttcttgaacctcttggtctggttgaggaagcggctaagacggctcctggaaagaagaggcctgtagagcagtctcctcaggaaccggactcctccgcgggtattggcaaatcgggtgcacagcccgctaaaaagagactcaatttcggtcagactggcgacacagagtcagtcccagaccctcaaccaatcggagaacctcccgcagccccctcaggtgtgggatctcttacaatggcttcaggtggtggcgcaccagtggcagacaataacgaaggtgccgatggagtgggtagttcctcgggaaattggcattgcgattcccaatggctgggggacagagtcatcaccaccagcacccgaacctgggccctgcccacctacaacaatcacctctacaagcaaatctccaacagcacatctggaggatcttcaaatgacaacgcctacttcggctacagcaccccctgggggtattttgacttcaacagattccactgccacttctcaccacgtgactggcagcgactcatcaacaacaactggggattccggcctaagcgactcaacttcaagctcttcaacattcaggtcaaagaggttacggacaacaatggagtcaagaccatcgccaataaccttaccagcacggtccaggtcttcacggactcagactatcagctcccgtacgtgctcgggtcggctcacgagggctgcctcccgccgttcccagcggacgttttcatgattcctcagtacgggtatctgacgcttaatgatggaagccaggccgtgggtcgttcgtccttttactgcctggaatatttcccgtcgcaaatgctaagaacgggtaacaacttccagttcagctacgagtttgagaacgtacctttccatagcagctacgctcacagccaaagcctggaccgactaatgaatccactcatcgaccaatacttgtactatctctcaaagactattaacggttctggaattaatcaacaaacgctaaaattcagtgtggccggacccagcaacatggctgtccagggaagaaactacatacctggacccagctaccgacaacaacgtgtctcaaccactgtgactcaaaacaacaacagcgaatttgcttggcctggagcttcttcttgggctctcaatggacgtaatagcttgatgaatcctggacctgctatggccagccacaaagaaggagaggaccgtttctttcctttgtctggatctttaatttttggcaaacaaggaactggaagagacaacgtggatgcggacaaagtcatgataaccaacgaagaagaaattaaaactactaacccggtagcaacggagtcctatggacaagtggccacaaaccaccagagtgcccgggcacaggcgcagaccggctgggttcaaaaccaaggaatacttccgggtatggtttggcaggacagagatgtgtacctgcaaggacccatttgggccaaaattcctcacacggacggcaactttcacccttctccgctgatgggagggtttggaatgaagcacccgcctcctcagatcctcatcaaaaacacacctgtacctgcggatcctccaacggccttcaacaagggcaagctgaactctttcatcacccagtattctactggccaagtcagcgtggagatcgagtgggagctgcagaaggaaaacagcaagcgctggaacccggagatccagtacacttccaactattacaagtctaataatgttgaatttgctgttaatactgaaggtgtatatagtgaaccccgccccattggcaccagatacctgactcgtaatctg

SEQ ID NO: 516 - protein, 736 aa, synthetic construct
  REGION 1..736: note = Adeno Associated Virus Capsid Protein Variant
MAADGYLPDWLEDNLSEGIREWWALKPGAPQPKANQQHQDNARGLVLPGYKYLGPGNGLDKGEPVNAADAAALEHDKAYDQQLKAGDNPYLKYNHADAEFQERLKEDTSFGGNLGRAVFQAKKRLLEPLGLVEEAAKTAPGKKRPVEQSPQEPDSSAGIGKSGAQPAKKRLNFGQTGDTESVPDPQPIGEPPAAPSGVGSLTMASGGGAPVADNNEGADGVGSSSGNWHCDSQWLGDRVITTSTRTWALPTYNNHLYKQISNSTSGGSSNDNAYFGYSTPWGYFDFNRFHCHFSPRDWQRLINNNWGFRPKRLNFKLFNIQVKEVTDNNGVKTIANNLTSTVQVFTDSDYQLPYVLGSAHEGCLPPFPADVFMIPQYGYLTLNDGSQAVGRSSFYCLEYFPSQMLRTGNNFQFSYEFENVPFHSSYAHSQSLDRLMNPLIDQYLYYLSKTINGSGINQQTLKFSVAGPSNMAVQGRNYIPGPSYRQQRVSTTVTQNNNSEFAWPGASSWALNGRNSLMNPGPAMASHKEGEDRFFPLSGSLIFGKQGTGRDNVDADKVMITNEEEIKTTNPVATESYGQVATNHQSARAQAQTGWVQNQGILPGMVWQDRDVYLQGPIWAKIPHTDGNFHPSPLMGGFGMKHPPPQILIKNTPVPADPPTAFNKGKLNSFITQYSTGQVSVEIEWELQKENSKRWNPEIQYTSNYYKSNNVEFAVNTEGVYSEPRPIGTRYLTRNL

SEQ ID NO: 517 - DNA, 2208 bp, synthetic construct
  misc_feature 1..2208: note = Adeno Associated Virus Capsid Protein Variant
  source 1..2208: mol_type = other DNA
atggctgccgatggttatcttccagattggctcgaggacaaccttagtgaaggaattcgcgagtggtgggctttgaaacctggagcccctcaacccaaggcaaatcaacaacatcaagacaacgctcgaggtcttgtgcttccgggttacaaataccttggacccggcaacggactcgacaagggggagccggtcaacgcagcagacgcggcggccctcgagcacgacaaggcctacgaccagcagctcaaggccggagacaacccgtacctcaagtacaaccacgccgacgccgagttccaggagcggctcaaagaagatacgtcttttgggggcaacctcgggcgagcagtcttccaggccaaaaagaggcttcttgaacctcttggtctggttgaggaagcggctaagacggctcctggaaagaagaggcctgtagagcagtctcctcaggaaccggactcctccgcgggtattggcaaatcgggtgcacagcccgctaaaaagagactcaatttcggtcagactggcgacacagagtcagtcccagaccctcaaccaatcggagaacctcccgcagccccctcaggtgtgggatctcttacaatggcttcaggtggtggcgcaccagtggcagacaataacgaaggtgccgatggagtgggtagttcctcgggaaattggcattgcgattcccaatggctgggggacagagtcatcaccaccagcacccgaacctgggccctgcccacctacaacaatcacctctacaagcaaatctccaacagcacatctggaggatcttcaaatgacaacgcctacttcggctacagcaccccctgggggtattttgacttcaacagattccactgccacttctcaccacgtgactggcagcgactcatcaacaacaactggggattccggcctaagcgactcaacttcaagctcttcaacattcaggtcaaagaggttacggacaacaatggagtcaagaccatcgccaataaccttaccagcacggtccaggtcttcacggactcagactatcagctcccgtacgtgctcgggtcggctcacgagggctgcctcccgccgttcccagcggacgttttcatgattcctcagtacgggtatctgacgcttaatgatggaagccaggccgtgggtcgttcgtccttttactgcctggaatatttcccgtcgcaaatgctaagaacgggtaacaacttccagttcagctacgagtttgagaacgtacctttccatagcagctacgctcacagccaaagcctggaccgactaatgaatccactcatcgaccaatacttgtactatctctcaaagactattaacggttctggacagaatcaacaaacgctaaaattcagtgtggccggacccagcaacatggctgtccagggaagaaactacatacctggacccagctaccgacaacaacgtgtctcaaccactgtgactcaaaacaacaacagcgaatttgcttggcctggagcttcttcttgggctctcaatggacgtaatagcttgatgaatcctggacctgctatggccagccacaaagaaggagaggaccgtttctttcctttgtctggatctttaatttttggcaaacaaggaactggaagagacaacgtggatgcggacaaagtcatgataaccaacgaagaagaaattaaaactactaacccggtagcaacggagtcctatggacaagtggccacaaaccaccagagtatccgggcacaggcgcagaccggctgggttcaaaaccaaggaatacttccgggtatggtttggcaggacagagatgtgtacctgcaaggacccatttgggccaaaattcctcacacggacggcaactttcacccttctccgctgatgggagggtttggaatgaagcacccgcctcctcagatcctcatcaaaaacacacctgtacctgcggatcctccaacggccttcaacaagggcaagctgaactctttcatcacccagtattctactggccaagtcagcgtggagatcgagtgggagctgcagaaggaaaacagcaagcgctggaacccggagatccagtacacttccaactattacaagtctaataatgttgaatttgctgttaatactgaaggtgtatatagtgaaccccgccccattggcaccagatacctgactcgtaatctg

SEQ ID NO: 518 - protein, 736 aa, synthetic construct
  REGION 1..736: note = Adeno Associated Virus Capsid Protein Variant
MAADGYLPDWLEDNLSEGIREWWALKPGAPQPKANQQHQDNARGLVLPGYKYLGPGNGLDKGEPVNAADAAALEHDKAYDQQLKAGDNPYLKYNHADAEFQERLKEDTSFGGNLGRAVFQAKKRLLEPLGLVEEAAKTAPGKKRPVEQSPQEPDSSAGIGKSGAQPAKKRLNFGQTGDTESVPDPQPIGEPPAAPSGVGSLTMASGGGAPVADNNEGADGVGSSSGNWHCDSQWLGDRVITTSTRTWALPTYNNHLYKQISNSTSGGSSNDNAYFGYSTPWGYFDFNRFHCHFSPRDWQRLINNNWGFRPKRLNFKLFNIQVKEVTDNNGVKTIANNLTSTVQVFTDSDYQLPYVLGSAHEGCLPPFPADVFMIPQYGYLTLNDGSQAVGRSSFYCLEYFPSQMLRTGNNFQFSYEFENVPFHSSYAHSQSLDRLMNPLIDQYLYYLSKTINGSGQNQQTLKFSVAGPSNMAVQGRNYIPGPSYRQQRVSTTVTQNNNSEFAWPGASSWALNGRNSLMNPGPAMASHKEGEDRFFPLSGSLIFGKQGTGRDNVDADKVMITNEEEIKTTNPVATESYGQVATNHQSIRAQAQTGWVQNQGILPGMVWQDRDVYLQGPIWAKIPHTDGNFHPSPLMGGFGMKHPPPQILIKNTPVPADPPTAFNKGKLNSFITQYSTGQVSVEIEWELQKENSKRWNPEIQYTSNYYKSNNVEFAVNTEGVYSEPRPIGTRYLTRNL

SEQ ID NO: 519 - DNA, 2208 bp, synthetic construct
  misc_feature 1..2208: note = Adeno Associated Virus Capsid Protein Variant
  source 1..2208: mol_type = other DNA
atggctgccgatggttatcttccagattggctcgaggacaaccttagtgaaggaattcgcgagtggtgggctttgaaacctggagcccctcaacccaaggcaaatcaacaacatcaagacaacgctcgaggtcttgtgcttccgggttacaaataccttggacccggcaacggactcgacaagggggagccggtcaacgcagcagacgcggcggccctcgagcacgacaaggcctacgaccagcagctcaaggccggagacaacccgtacctcaagtacaaccacgccgacgccgagttccaggagcggctcaaagaagatacgtcttttgggggcaacctcgggcgagcagtcttccaggccaaaaagaggcttcttgaacctcttggtctggttgaggaagcggctaagacggctcctggaaagaagaggcctgtagagcagtctcctcaggaaccggactcctccgcgggtattggcaaatcgggtgcacagcccgctaaaaagagactcaatttcggtcagactggcgacacagagtcagtcccagaccctcaaccaatcggagaacctcccgcagccccctcaggtgtgggatctcttacaatggcttcaggtggtggcgcaccagtggcagacaataacgaaggtgccgatggagtgggtagttcctcgggaaattggcattgcgattcccaatggctgggggacagagtcatcaccaccagcacccgaacctgggccctgcccacctacaacaatcacctctacaagcaaatctccaacagcacatctggaggatcttcaaatgacaacgcctacttcggctacagcaccccctgggggtattttgacttcaacagattccactgccacttctcaccacgtgactggcagcgactcatcaacaacaactggggattccggcctaagcgactcaacttcaagctcttcaacattcaggtcaaagaggttacggacaacaatggagtcaagaccatcgccaataaccttaccagcacggtccaggtcttcacggactcagactatcagctcccgtacgtgctcgggtcggctcacgagggctgcctcccgccgttcccagcggacgttttcatgattcctcagtacgggtatctgacgcttaatgatggaagccaggccgtgggtcgttcgtccttttactgcctggaatatttcccgtcgcaaatgctaagaacgggtaacaacttccagttcagctacgagtttgagaacgtacctttccatagcagctacgctcacagccaaagcctggaccgactaatgaatccactcatcgaccaatacttgtactatctctcaaagactattaacggttctggacagaatcaacaaacgctaaaattcagtgtggccggacccagcaacatggctgtccagggaagaaactacatacctggacccagctaccgacaacaacgtgtctcaaccactgtgactcaaaacaacaacagcgaatttgcttggcctggagcttcttcttgggctctcaatggacgtaatagcttgatgaatcctggacctgctatggccagccacaaagaaggagaggaccgtttctttcctttgtctggatctttaatttttggcaaacaaggaactggaagagacaacgtggatgcggacaaagtcatgataaccaacgaagaagaaattaaaactactaacccggtagcaacggagtcctatggacaagtggccacaaaccaccagaacgcccgggcacaggcgcagaccggctgggttcaaaaccaaggaatacttccgggtatggtttggcaggacagagatgtgtacctgcaaggacccatttgggccaaaattcctcacacggacggcaactttcacccttctccgctgatgggagggtttggaatgaagcacccgcctcctcagatcctcatcaaaaacacacctgtacctgcggatcctccaacggccttcaacaagggcaagctgaactctttcatcacccagtattctactggccaagtcagcgtggagatcgagtgggagctgcagaaggaaaacagcaagcgctggaacccggagatccagtacacttccaactattacaagtctaataatgttgaatttgctgttaatactgaaggtgtatatagtgaaccccgccccattggcaccagatacctgactcgtaatctg

SEQ ID NO: 520 - protein, 736 aa, synthetic construct
  REGION 1..736: note = Adeno Associated Virus Capsid Protein Variant
MAADGYLPDWLEDNLSEGIREWWALKPGAPQPKANQQHQDNARGLVLPGYKYLGPGNGLDKGEPVNAADAAALEHDKAYDQQLKAGDNPYLKYNHADAEFQERLKEDTSFGGNLGRAVFQAKKRLLEPLGLVEEAAKTAPGKKRPVEQSPQEPDSSAGIGKSGAQPAKKRLNFGQTGDTESVPDPQPIGEPPAAPSGVGSLTMASGGGAPVADNNEGADGVGSSSGNWHCDSQWLGDRVITTSTRTWALPTYNNHLYKQISNSTSGGSSNDNAYFGYSTPWGYFDFNRFHCHFSPRDWQRLINNNWGFRPKRLNFKLFNIQVKEVTDNNGVKTIANNLTSTVQVFTDSDYQLPYVLGSAHEGCLPPFPADVFMIPQYGYLTLNDGSQAVGRSSFYCLEYFPSQMLRTGNNFQFSYEFENVPFHSSYAHSQSLDRLMNPLIDQYLYYLSKTINGSGQNQQTLKFSVAGPSNMAVQGRNYIPGPSYRQQRVSTTVTQNNNSEFAWPGASSWALNGRNSLMNPGPAMASHKEGEDRFFPLSGSLIFGKQGTGRDNVDADKVMITNEEEIKTTNPVATESYGQVATNHQNARAQAQTGWVQNQGILPGMVWQDRDVYLQGPIWAKIPHTDGNFHPSPLMGGFGMKHPPPQILIKNTPVPADPPTAFNKGKLNSFITQYSTGQVSVEIEWELQKENSKRWNPEIQYTSNYYKSNNVEFAVNTEGVYSEPRPIGTRYLTRNL

SEQ ID NO: 521 - DNA, 2208 bp, synthetic construct
  misc_feature 1..2208: note = Adeno Associated Virus Capsid Protein Variant
  source 1..2208: mol_type = other DNA
atggctgccgatggttatcttccagattggctcgaggacaaccttagtgaaggaattcgcgagtggtgggctttgaaacctggagcccctcaacccaaggcaaatcaacaacatcaagacaacgctcgaggtcttgtgcttccgggttacaaataccttggacccggcaacggactcgacaagggggagccggtcaacgcagcagacgcggcggccctcgagcacgacaaggcctacgaccagcagctcaaggccggagacaacccgtacctcaagtacaaccacgccgacgccgagttccaggagcggctcaaagaagatacgtcttttgggggcaacctcgggcgagcagtcttccaggccaaaaagaggcttcttgaacctcttggtctggttgaggaagcggctaagacggctcctggaaagaagaggcctgtagagcagtctcctcaggaaccggactcctccgcgggtattggcaaatcgggtgcacagcccgctaaaaagagactcaatttcggtcagactggcgacacagagtcagtcccagaccctcaaccaatcggagaacctcccgcagccccctcaggtgtgggatctcttacaatggcttcaggtggtggcgcaccagtggcagacaataacgaaggtgccgatggagtgggtagttcctcgggaaattggcattgcgattcccaatggctgggggacagagtcatcaccaccagcacccgaacctgggccctgcccacctacaacaatcacctctacaagcaaatctccaacagcacatctggaggatcttcaaatgacaacgcctacttcggctacagcaccccctgggggtattttgacttcaacagattccactgccacttctcaccacgtgactggcagcgactcatcaacaacaactggggattccggcctaagcgactcaacttcaagctcttcaacattcaggtcaaagaggttacggacaacaatggagtcaagaccatcgccaataaccttaccagcacggtccaggtcttcacggactcagactatcagctcccgtacgtgctcgggtcggctcacgagggctgcctcccgccgttcccagcggacgttttcatgattcctcagtacgggtatctgacgcttaatgatggaagccaggccgtgggtcgttcgtccttttactgcctggaatatttcccgtcgcaaatgctaagaacgggtaacaacttccagttcagctacgagtttgagaacgtacctttccatagcagctacgctcacagccaaagcctggaccgactaatgaatccactcatcgaccaatacttgtactatctctcaaagactattaacggttctggacagaatcaacaaacgctaaaattcagtgtggccggacccagcaacatggctgtccagggaagaaactacatacctggacccagctaccgacaacaacgtgtctcaaccactgtgactcaaaacaacaacagcgaatttgcttggcctggagcttcttcttgggctctcaatggacgtaatagcttgatgaatcctggacctgctatggccagccacaaagaaggagaggaccgtttctttcctttgtctggatctttaatttttggcaaacaaggaactggaagagacaacgtggatgcggacaaagtcatgataaccaacgaagaagaaattaaaactactaacccggtagcaacggagtcctatggacaagtggccacaaaccaccagagtgcccgggcacaggcgcagaccggctgggttcaaaaccaaggaatacttccgggtatggtttggcaggacagagatgtgtacctgcaaggacccatttgggccaaaattcctcacacggacggcaactttcacccttctccgctgatgggagggtttggaatgaagcacccgcctcctcagatcctcatcaaaaacacacctgtacctgcggatcctccaacggccttcaacaagggcaagctgcgctctttcatcacccagtattctactggccaagtcagcgtggagatcgagtgggagctgcagaaggaaaacagcaagcgctggaacccggagatccagtacacttccaactattacaagtctaataatgttgaatttgctgttaatactgaaggtgtatatagtgaaccccgccccattggcaccagatacctgactcgtaatctg

SEQ ID NO: 522 - protein, 736 aa, synthetic construct
  REGION 1..736: note = Adeno Associated Virus Capsid Protein Variant
MAADGYLPDWLEDNLSEGIREWWALKPGAPQPKANQQHQDNARGLVLPGYKYLGPGNGLDKGEPVNAADAAALEHDKAYDQQLKAGDNPYLKYNHADAEFQERLKEDTSFGGNLGRAVFQAKKRLLEPLGLVEEAAKTAPGKKRPVEQSPQEPDSSAGIGKSGAQPAKKRLNFGQTGDTESVPDPQPIGEPPAAPSGVGSLTMASGGGAPVADNNEGADGVGSSSGNWHCDSQWLGDRVITTSTRTWALPTYNNHLYKQISNSTSGGSSNDNAYFGYSTPWGYFDFNRFHCHFSPRDWQRLINNNWGFRPKRLNFKLFNIQVKEVTDNNGVKTIANNLTSTVQVFTDSDYQLPYVLGSAHEGCLPPFPADVFMIPQYGYLTLNDGSQAVGRSSFYCLEYFPSQMLRTGNNFQFSYEFENVPFHSSYAHSQSLDRLMNPLIDQYLYYLSKTINGSGQNQQTLKFSVAGPSNMAVQGRNYIPGPSYRQQRVSTTVTQNNNSEFAWPGASSWALNGRNSLMNPGPAMASHKEGEDRFFPLSGSLIFGKQGTGRDNVDADKVMITNEEEIKTTNPVATESYGQVATNHQSARAQAQTGWVQNQGILPGMVWQDRDVYLQGPIWAKIPHTDGNFHPSPLMGGFGMKHPPPQILIKNTPVPADPPTAFNKGKLRSFITQYSTGQVSVEIEWELQKENSKRWNPEIQYTSNYYKSNNVEFAVNTEGVYSEPRPIGTRYLTRNL

SEQ ID NO: 523 - DNA, 2208 bp, synthetic construct
  misc_feature 1..2208: note = Adeno Associated Virus Capsid Protein Variant
  source 1..2208: mol_type = other DNA
atggctgccgatggttatcttccagattggctcgaggacaaccttagtgaaggaattcgcgagtggtgggctttgaaacctggagcccctcaacccaaggcaaatcaacaacatcaagacaacgctcgaggtcttgtgcttccgggttacaaataccttggacccggcaacggactcgacaagggggagccggtcaacgcagcagacgcggcggccctcgagcacgacaaggcctacgaccagcagctcaaggccggagacaacccgtacctcaagtacaaccacgccgacgccgagttccaggagcggctcaaagaagatacgtcttttgggggcaacctcgggcgagcagtcttccaggccaaaaagaggcttcttgaacctcttggtctggttgaggaagcggctaagacggctcctggaaagaagaggcctgtagagcagtctcctcaggaaccggactcctccgcgggtattggcaaatcgggtgcacagcccgctaaaaagagactcaatttcggtcagactggcgacacagagtcagtcccagaccctcaaccaatcggagaacctcccgcagccccctcaggtgtgggatctcttacaatggcttcaggtggtggcgcaccagtggcagacaataacgaaggtgccgatggagtgggtagttcctcgggaaattggcattgcgattcccaatggctgggggacagagtcatcaccaccagcacccgaacctgggccctgcccacctacaacaatcacctctacaagcaaatctccaacagcacatctggaggatcttcaaatgacaacgcctacttcggctacagcaccccctgggggtattttgacttcaacagattccactgccacttctcaccacgtgactggcagcgactcatcaacaacaactggggattccggcctaagcgactcaacttcaagctcttcaacattcaggtcaaagaggttacggacaacaatggagtcaagaccatcgccaataaccttaccagcacggtccaggtcttcacggactcagactatcagctcccgtacgtgctcgggtcggctcacgagggctgcctcccgccgttcccagcggacgttttcatgattcctcagtacgggtatctgacgcttaatgatggaagccaggccgtgggtcgttcgtccttttactgcctggaatatttcccgtcgcaaatgctaagaacgggtaacaacttccagttcagctacgagtttgagaacgtacctttccatagcagctacgctcacagccaaagcctggaccgactaatgaatccactcatcgaccaatacttgtactatctctcaaagactattaacggttctggacagaatcaacaaacgctaaaattcagtaaagccggacccagcaacatggctgtccagggaagaaactacatacctggacccagctaccgacaacaacgtgtctcaaccactgtgactcaaaacaacaacagcgaatttgcttggcctggagcttcttcttgggctctcaatggacgtaatagcttgatgaatcctggacctgctatggccagccacaaagaaggagaggaccgtttctttcctttgtctggatctttaatttttggcaaacaaggaactggaagagacaacgtggatgcggacaaagtcatgataaccaacgaagaagaaattaaaactactaacccggtagcaacggagtcctatggacaagtggccacaaaccaccagagtgcccgggcacaggcgcagaccggctgggttcaaaaccaaggaatacttccgggtatggtttggcaggacagagatgtgtacctgcaaggacccatttgggccaaaattcctcacacggacggcaactttcacccttctccgctgatgggagggtttggaatgaagcacccgcctcctcagatcctcatcaaaaacacacctgtacctgcggatcctccaacggccttcaacaagggcaagctgaactctttcatcacccagtattctactggccaagtcagcgtggagatcgagtgggagctgcagaaggaaaacagcaagcgctggaacccggagatccagtacacttccaactattacaagtctaataatgttgaatttgctgttaatactgaaggtgtatatagtgaaccccgccccattggcaccagatacctgactcgtaatctg

SEQ ID NO: 524 - protein, 736 aa, synthetic construct
  REGION 1..736: note = Adeno Associated Virus Capsid Protein Variant
MAADGYLPDWLEDNLSEGIREWWALKPGAPQPKANQQHQDNARGLVLPGYKYLGPGNGLDKGEPVNAADAAALEHDKAYDQQLKAGDNPYLKYNHADAEFQERLKEDTSFGGNLGRAVFQAKKRLLEPLGLVEEAAKTAPGKKRPVEQSPQEPDSSAGIGKSGAQPAKKRLNFGQTGDTESVPDPQPIGEPPAAPSGVGSLTMASGGGAPVADNNEGADGVGSSSGNWHCDSQWLGDRVITTSTRTWALPTYNNHLYKQISNSTSGGSSNDNAYFGYSTPWGYFDFNRFHCHFSPRDWQRLINNNWGFRPKRLNFKLFNIQVKEVTDNNGVKTIANNLTSTVQVFTDSDYQLPYVLGSAHEGCLPPFPADVFMIPQYGYLTLNDGSQAVGRSSFYCLEYFPSQMLRTGNNFQFSYEFENVPFHSSYAHSQSLDRLMNPLIDQYLYYLSKTINGSGQNQQTLKFSKAGPSNMAVQGRNYIPGPSYRQQRVSTTVTQNNNSEFAWPGASSWALNGRNSLMNPGPAMASHKEGEDRFFPLSGSLIFGKQGTGRDNVDADKVMITNEEEIKTTNPVATESYGQVATNHQSARAQAQTGWVQNQGILPGMVWQDRDVYLQGPIWAKIPHTDGNFHPSPLMGGFGMKHPPPQILIKNTPVPADPPTAFNKGKLNSFITQYSTGQVSVEIEWELQKENSKRWNPEIQYTSNYYKSNNVEFAVNTEGVYSEPRPIGTRYLTRNL

SEQ ID NO: 525 - DNA, 2208 bp, synthetic construct
  misc_feature 1..2208: note = Adeno Associated Virus Capsid Protein Variant
  source 1..2208: mol_type = other DNA
atggctgccgatggttatcttccagattggctcgaggacaaccttagtgaaggaattcgcgagtggtgggctttgaaacctggagcccctcaacccaaggcaaatcaacaacatcaagacaacgctcgaggtcttgtgcttccgggttacaaataccttggacccggcaacggactcgacaagggggagccggtcaacgcagcagacgcggcggccctcgagcacgacaaggcctacgaccagcagctcaaggccggagacaacccgtacctcaagtacaaccacgccgacgccgagttccaggagcggctcaaagaagatacgtcttttgggggcaacctcgggcgagcagtcttccaggccaaaaagaggcttcttgaacctcttggtctggttgaggaagcggctaagacggctcctggaaagaagaggcctgtagagcagtctcctcaggaaccggactcctccgcgggtattggcaaatcgggtgcacagcccgctaaaaagagactcaatttcggtcagactggcgacacagagtcagtcccagaccctcaaccaatcggagaacctcccgcagccccctcaggtgtgggatctcttacaatggcttcaggtggtggcgcaccagtggcagacaataacgaaggtgccgatggagtgggtagttcctcgggaaattggcattgcgattcccaatggctgggggacagagtcatcaccaccagcacccgaacctgggccctgcccacctacaacaatcacctctacaagcaaatctccaacagcacatctggaggatcttcaaatgacaacgcctacttcggctacagcaccccctgggggtattttgacttcaacagattccactgccacttctcaccacgtgactggcagcgactcatcaacaacaactggggattccggcctaagcgactcaacttcaagctcttcaacattcaggtcaaagaggttacggacaacaatggagtcaagaccatcgccaataaccttaccagcacggtccaggtcttcacggactcagactatcagctcccgtacgtgctcgggtcggctcacgagggctgcctcccgccgttcccagcggacgttttcatgattcctcagtacgggtatctgacgcttaatgatggaagccaggccgtgggtcgttcgtccttttactgcctggaatatttcccgtcgcaaatgctaagaacgggtaacaacttccagttcagctacgagtttgagaacgtacctttccatagcagctacgctcacagccaaagcctggaccgactaatgaatccactcatcgaccaatacttgtactatctctcaaagactattaacggtccgggacagaatcaacaaacgctaaaattcagtgtggccggacccagcaacatggctgtccagggaagaaactacatacctggacccagctaccgacaacaacgtgtctcaaccactgtgactcaaaacaacaacagcgaatttgcttggcctggagcttcttcttgggctctcaatggacgtaatagcttgatgaatcctggacctgctatggccagccacaaagaaggagaggaccgtttctttcctttgtctggatctttaatttttggcaaacaaggaactggaagagacaacgtggatgcggacaaagtcatgataaccaacgaagaagaaattaaaactactaacccggtagcaacggagtcctatggacaagtggccacaaaccaccagagtgcccgggcacaggcgcagaccggctgggttcaaaaccaaggaatacttccgggtatggtttggcaggacagagatgtgtacctgcaaggacccatttgggccaaaattcctcacacggacggcaactttcacccttctccgctgatgggagggtttggaatgaagcacccgcctcctcagatcctcatcaaaaacacacctgtacctgcggatcctccaacggccttcaacaagggcaagctgaactctttcatcacccagtattctactggccaagtcagcgtggagatcgagtgggagctgcagaaggaaaacagcaagcgctggaacccggagatccagtacacttccaactattacaagtctaataatgttgaatttgctgttaatactgaaggtgtatatagtgaaccccgccccattggcaccagatacctgactcgtaatctg

SEQ ID NO: 526 - protein, 736 aa, synthetic construct
  REGION 1..736: note = Adeno Associated Virus Capsid Protein Variant
MAADGYLPDWLEDNLSEGIREWWALKPGAPQPKANQQHQDNARGLVLPGYKYLGPGNGLDKGEPVNAADAAALEHDKAYDQQLKAGDNPYLKYNHADAEFQERLKEDTSFGGNLGRAVFQAKKRLLEPLGLVEEAAKTAPGKKRPVEQSPQEPDSSAGIGKSGAQPAKKRLNFGQTGDTESVPDPQPIGEPPAAPSGVGSLTMASGGGAPVADNNEGADGVGSSSGNWHCDSQWLGDRVITTSTRTWALPTYNNHLYKQISNSTSGGSSNDNAYFGYSTPWGYFDFNRFHCHFSPRDWQRLINNNWGFRPKRLNFKLFNIQVKEVTDNNGVKTIANNLTSTVQVFTDSDYQLPYVLGSAHEGCLPPFPADVFMIPQYGYLTLNDGSQAVGRSSFYCLEYFPSQMLRTGNNFQFSYEFENVPFHSSYAHSQSLDRLMNPLIDQYLYYLSKTINGPGQNQQTLKFSVAGPSNMAVQGRNYIPGPSYRQQRVSTTVTQNNNSEFAWPGASSWALNGRNSLMNPGPAMASHKEGEDRFFPLSGSLIFGKQGTGRDNVDADKVMITNEEEIKTTNPVATESYGQVATNHQSARAQAQTGWVQNQGILPGMVWQDRDVYLQGPIWAKIPHTDGNFHPSPLMGGFGMKHPPPQILIKNTPVPADPPTAFNKGKLNSFITQYSTGQVSVEIEWELQKENSKRWNPEIQYTSNYYKSNNVEFAVNTEGVYSEPRPIGTRYLTRNL

SEQ ID NO: 527 - DNA, 2208 bp, synthetic construct
  misc_feature 1..2208: note = Adeno Associated Virus Capsid Protein Variant
  source 1..2208: mol_type = other DNA
atggctgccgatggttatcttccagattggctcgaggacaaccttagtgaaggaattcgcgagtggtgggctttgaaacctggagcccctcaacccaaggcaaatcaacaacatcaagacaacgctcgaggtcttgtgcttccgggttacaaataccttggacccggcaacggactcgacaagggggagccggtcaacgcagcagacgcggcggccctcgagcacgacaaggcctacgaccagcagctcaaggccggagacaacccgtacctcaagtacaaccacgccgacgccgagttccaggagcggctcaaagaagatacgtcttttgggggcaacctcgggcgagcagtcttccaggccaaaaagaggcttcttgaacctcttggtctggttgaggaagcggctaagacggctcctggaaagaagaggcctgtagagcagtctcctcaggaaccggactcctccgcgggtattggcaaatcgggtgcacagcccgctaaaaagagactcaatttcggtcagactggcgacacagagtcagtcccagaccctcaaccaatcggagaacctcccgcagccccctcaggtgtgggatctcttacaatggcttcaggtggtggcgcaccagtggcagacaataacgaaggtgccgatggagtgggtagttcctcgggaaattggcattgcgattcccaatggctgggggacagagtcatcaccaccagcacccgaacctgggccctgcccacctacaacaatcacctctacaagcaaatctccaacagcacatctggaggatcttcaaatgacaacgcctacttcggctacagcaccccctgggggtattttgacttcaacagattccactgccacttctcaccacgtgactggcagcgactcatcaacaacaactggggattccggcctaagcgactcaacttcaagctcttcaacattcaggtcaaagaggttacggacaacaatggagtcaagaccatcgccaataaccttaccagcacggtccaggtcttcacggactcagactatcagctcccgtacgtgctcgggtcggctcacgagggctgcctcccgccgttcccagcggacgttttcatgattcctcagtacgggtatctgacgcttaatgatggaagccaggccgtgggtcgttcgtccttttactgcctggaatatttcccgtcgcaaatgctaagaacgggtaacaacttccagttcagctacgagtttgagaacgtacctttccatagcagctacgctcacagccaaagcctggaccgactaatgaatccactcatcgaccaatacttgtactatctctcaaagactattaacggttctggacagaatcaacaaacgctaaaattcagtgtggccggacccagcaacatggctgtccagggaagaaactacatacctggacccagctaccgacaacaacgtgtctcaaccactgtgacttttaacaacaacagcgaatttgcttggccttacgcttcttcttgggctctcaatggacgtaatagcttgatgaatcctggacctgctatggccagccacaaagaaggagagacccgtttctttcctttgtctggatctttaatttttggcaaacaaggaactggaagagacaacgtggatgcggacaaagtcatgataaccaacgaagaagaaattaaaactactaacccggtagcaacggagtcctatggacaagtggccacaaaccaccagagtgcccgggcacaggcgcagaccggctgggttcaaaaccaaggaatacttccgggtatggtttggcaggacagagatgtgtacctgcaaggacccatttgggccaaaattcctcacacggacggcaactttcacccttctccgctgatgggagggtttggaatgaagcacccgcctcctcagatcctcatcaaaaacacacctgtacctgcggatcctccaacggccttcaacaagggcaagctgaactctttcatcacccagtattctactggccaagtcagcgtggagatcgagtgggagctgcagaaggaaaacagcaagcgctggaacccggagatccagtacacttccaactattacaagtctaataatgttgaatttgctgttaatactgaaggtgtatatagtgaaccccgccccattggcaccagatacctgactcgtaatctg

SEQ ID NO: 528 - protein, 736 aa, synthetic construct
  REGION 1..736: note = Adeno Associated Virus Capsid Protein Variant
MAADGYLPDWLEDNLSEGIREWWALKPGAPQPKANQQHQDNARGLVLPGYKYLGPGNGLDKGEPVNAADAAALEHDKAYDQQLKAGDNPYLKYNHADAEFQERLKEDTSFGGNLGRAVFQAKKRLLEPLGLVEEAAKTAPGKKRPVEQSPQEPDSSAGIGKSGAQPAKKRLNFGQTGDTESVPDPQPIGEPPAAPSGVGSLTMASGGGAPVADNNEGADGVGSSSGNWHCDSQWLGDRVITTSTRTWALPTYNNHLYKQISNSTSGGSSNDNAYFGYSTPWGYFDFNRFHCHFSPRDWQRLINNNWGFRPKRLNFKLFNIQVKEVTDNNGVKTIANNLTSTVQVFTDSDYQLPYVLGSAHEGCLPPFPADVFMIPQYGYLTLNDGSQAVGRSSFYCLEYFPSQMLRTGNNFQFSYEFENVPFHSSYAHSQSLDRLMNPLIDQYLYYLSKTINGSGQNQQTLKFSVAGPSNMAVQGRNYIPGPSYRQQRVSTTVTFNNNSEFAWPYASSWALNGRNSLMNPGPAMASHKEGETRFFPLSGSLIFGKQGTGRDNVDADKVMITNEEEIKTTNPVATESYGQVATNHQSARAQAQTGWVQNQGILPGMVWQDRDVYLQGPIWAKIPHTDGNFHPSPLMGGFGMKHPPPQILIKNTPVPADPPTAFNKGKLNSFITQYSTGQVSVEIEWELQKENSKRWNPEIQYTSNYYKSNNVEFAVNTEGVYSEPRPIGTRYLTRNL

SEQ ID NO: 529 - DNA, 2208 bp, synthetic construct
  misc_feature 1..2208: note = Adeno Associated Virus Capsid Protein Variant
  source 1..2208: mol_type = other DNA
atggctgccgatggttatcttccagattggctcgaggacaaccttagtgaaggaattcgcgagtggtgggctttgaaacctggagcccctcaacccaaggcaaatcaacaacatcaagacaacgctcgaggtcttgtgcttccgggttacaaataccttggacccggcaacggactcgacaagggggagccggtcaacgcagcagacgcggcggccctcgagcacgacaaggcctacgaccagcagctcaaggccggagacaacccgtacctcaagtacaaccacgccgacgccgagttccaggagcggctcaaagaagatacgtcttttgggggcaacctcgggcgagcagtcttccaggccaaaaagaggcttcttgaacctcttggtctggttgaggaagcggctaagacggctcctggaaagaagaggcctgtagagcagtctcctcaggaaccggactcctccgcgggtattggcaaatcgggtgcacagcccgctaaaaagagactcaatttcggtcagactggcgacacagagtcagtcccagaccctcaaccaatcggagaacctcccgcagccccctcaggtgtgggatctcttacaatggcttcaggtggtggcgcaccagtggcagacaataacgaaggtgccgatggagtgggtagttcctcgggaaattggcattgcgattcccaatggctgggggacagagtcatcaccaccagcacccgaacctgggccctgcccacctacaacaatcacctctacaagcaaatctccaacagcacatctggaggatcttcaaatgacaacgcctacttcggctacagcaccccctgggggtattttgacttcaacagattccactgccacttctcaccacgtgactggcagcgactcatcaacaacaactggggattccggcctaagcgactcaacttcaagctcttcaacattcaggtcaaagaggttacggacaacaatggagtcaagaccatcgccaataaccttaccagcacggtccaggtcttcacggactcagactatcagctcccgtacgtgctcgggtcggctcacgagggctgcctcccgccgttcccagcggacgttttcatgattcctcagtacgggtatctgacgcttaatgatggaagccaggccgtgggtcgttcgtccttttactgcctggaatatttcccgtcgcaaatgctaagaacgggtaacaacttccagttcagctacgagtttgagaacgtacctttccatagcagctacgctcacagccaaagcctggaccgactaatgaatccactcatcgaccaatacttgtactatctctcaaagactattaacggttctggacagaatcaacaaacgctaaaattcagtgtggccggacccagcaacatggctgtccagggaagaaactacatacctggacccagctaccgacaacaacgtgtctcaaccactgtgctgcaaaacagcaacagcgaatttgcttggcctggagcttcttcttgggctctcaatggacgtaatagcttgatgaatcctggacctgctatggccagccacaaagaaggagaggaccgtttctttcctttgtctggatctttaatttttggcaaacaaggaactggaagagacaacgtggatgcggacaaagtcatgataaccaacgaagaagaaattaaaactactaacccggtagcaacggagtcctatggacaagtggccacaaaccaccagagtgcccgggcacaggcgcagaccggctgggttcaaaaccaaggaatacttccgggtatggtttggcaggacagagatgtgtacctgcaaggacccatttgggccaaaattcctcacacggacggcaactttcacccttctccgctgatgggagggtttggaatgaagcacccgcctcctcagatcctcatcaaaaacacacctgtacctgcggatcctccaacggccttcaacaagggcaagctgaactctttcatcacccagtattctactggccaagtcagcgtggagatcgagtgggagctgcagaaggaaaacagcaagcgctggaacccggagatccagtacacttccaactattacaagtctaataatgttgaatttgctgttaatactgaaggtgtatatagtgaaccccgccccattggcaccagatacctgactcgtaatctg

SEQ ID NO: 530 - protein, 736 aa, synthetic construct
  REGION 1..736: note = Adeno Associated Virus Capsid Protein Variant
MAADGYLPDWLEDNLSEGIREWWALKPGAPQPKANQQHQDNARGLVLPGYKYLGPGNGLDKGEPVNAADAAALEHDKAYDQQLKAGDNPYLKYNHADAEFQERLKEDTSFGGNLGRAVFQAKKRLLEPLGLVEEAAKTAPGKKRPVEQSPQEPDSSAGIGKSGAQPAKKRLNFGQTGDTESVPDPQPIGEPPAAPSGVGSLTMASGGGAPVADNNEGADGVGSSSGNWHCDSQWLGDRVITTSTRTWALPTYNNHLYKQISNSTSGGSSNDNAYFGYSTPWGYFDFNRFHCHFSPRDWQRLINNNWGFRPKRLNFKLFNIQVKEVTDNNGVKTIANNLTSTVQVFTDSDYQLPYVLGSAHEGCLPPFPADVFMIPQYGYLTLNDGSQAVGRSSFYCLEYFPSQMLRTGNNFQFSYEFENVPFHSSYAHSQSLDRLMNPLIDQYLYYLSKTINGSGQNQQTLKFSVAGPSNMAVQGRNYIPGPSYRQQRVSTTVLQNSNSEFAWPGASSWALNGRNSLMNPGPAMASHKEGEDRFFPLSGSLIFGKQGTGRDNVDADKVMITNEEEIKTTNPVATESYGQVATNHQSARAQAQTGWVQNQGILPGMVWQDRDVYLQGPIWAKIPHTDGNFHPSPLMGGFGMKHPPPQILIKNTPVPADPPTAFNKGKLNSFITQYSTGQVSVEIEWELQKENSKRWNPEIQYTSNYYKSNNVEFAVNTEGVYSEPRPIGTRYLTRNL

SEQ ID NO: 531 - DNA, 2208 bp, synthetic construct
  misc_feature 1..2208: note = Adeno Associated Virus Capsid Protein Variant
  source 1..2208: mol_type = other DNA
atggctgccgatggttatcttccagattggctcgaggacaaccttagtgaaggaattcgcgagtggtgggctttgaaacctggagcccctcaacccaaggcaaatcaacaacatcaagacaacgctcgaggtcttgtgcttccgggttacaaataccttggacccggcaacggactcgacaagggggagccggtcaacgcagcagacgcggcggccctcgagcacgacaaggcctacgaccagcagctcaaggccggagacaacccgtacctcaagtacaaccacgccgacgccgagttccaggagcggctcaaagaagatacgtcttttgggggcaacctcgggcgagcagtcttccaggccaaaaagaggcttcttgaacctcttggtctggttgaggaagcggctaagacggctcctggaaagaagaggcctgtagagcagtctcctcaggaaccggactcctccgcgggtattggcaaatcgggtgcacagcccgctaaaaagagactcaatttcggtcagactggcgacacagagtcagtcccagaccctcaaccaatcggagaacctcccgcagccccctcaggtgtgggatctcttacaatggcttcaggtggtggcgcaccagtggcagacaataacgaaggtgccgatggagtgggtagttcctcgggaaattggcattgcgattcccaatggctgggggacagagtcatcaccaccagcacccgaacctgggccctgcccacctacaacaatcacctctacaagcaaatctccaacagcacatctggaggatcttcaaatgacaacgcctacttcggctacagcaccccctgggggtattttgacttcaacagattccactgccacttctcaccacgtgactggcagcgactcatcaacaacaactggggattccggcctaagcgactcaacttcaagctcttcaacattcaggtcaaagaggttacggacaacaatggagtcaagaccatcgccaataaccttaccagcacggtccaggtcttcacggactcagactatcagctcccgtacgtgctcgggtcggctcacgagggctgcctcccgccgttcccagcggacgttttcatgattcctcagtacgggtatctgacgcttaatgatggaagccaggccgtgggtcgttcgtccttttactgcctggaatatttcccgtcgcaaatgctaagaacgggtaacaacttccagttcagctacgagtttgagaacgtacctttccatagcagctacgctcacagccaaagcctggaccgactaatgaatccactcatcgaccaatacttgtactatctctcaaagactattaacggttctggacagaatcaacaaacgctaaaattcagtgtggccggacccagcaacatggctgtccagggaagaaactacatacctggacccagctaccgacaacaacgtgtctcaaccactgtgactcaaaacagcaacagcgaatttgcttggcctggagcttcttcttgggctctcaatggacgtaatagcttgatgaatcctggacctgctatggccagccacaaagaaggagaggaccgtttctttcctttgtctggatctttaatttttggcaaacaaggagtaggaagagacattgtggatgcggacaaagtcatgataaccaacgaagaagaaattaaaactactaacccggtagcaacggagtcctatggacaagtggccacaaaccaccagagtgcccgggcacaggcgcagaccggctgggttcaaaaccaaggaatacttccgggtatggtttggcaggacagagatgtgtacctgcaaggacccatttgggccaaaattcctcacacggacggcaactttcacccttctccgctaatgggagggtttggaatgaagcacccgcctcctcagatcctcatcaaaaacacacctgtacctgcggatcctccaacggccttcaacggcggcaagctgaactctttcatcacccagtattctactggccaagtcagcgtggagatcgagtgggagctgcagaaggaaaacagcaagcgctggaacccggagatccagtacacttccaactattacaagtctaataatgttgaatttgctgttaatactgaaggtgtatatagtgaaccccgccccattggcaccagatacctgactcgtaatctg

SEQ ID NO: 532 - protein, 736 aa, synthetic construct
  REGION 1..736: note = Adeno Associated Virus Capsid Protein Variant
MAADGYLPDWLEDNLSEGIREWWALKPGAPQPKANQQHQDNARGLVLPGYKYLGPGNGLDKGEPVNAADAAALEHDKAYDQQLKAGDNPYLKYNHADAEFQERLKEDTSFGGNLGRAVFQAKKRLLEPLGLVEEAAKTAPGKKRPVEQSPQEPDSSAGIGKSGAQPAKKRLNFGQTGDTESVPDPQPIGEPPAAPSGVGSLTMASGGGAPVADNNEGADGVGSSSGNWHCDSQWLGDRVITTSTRTWALPTYNNHLYKQISNSTSGGSSNDNAYFGYSTPWGYFDFNRFHCHFSPRDWQRLINNNWGFRPKRLNFKLFNIQVKEVTDNNGVKTIANNLTSTVQVFTDSDYQLPYVLGSAHEGCLPPFPADVFMIPQYGYLTLNDGSQAVGRSSFYCLEYFPSQMLRTGNNFQFSYEFENVPFHSSYAHSQSLDRLMNPLIDQYLYYLSKTINGSGQNQQTLKFSVAGPSNMAVQGRNYIPGPSYRQQRVSTTVTQNSNSEFAWPGASSWALNGRNSLMNPGPAMASHKEGEDRFFPLSGSLIFGKQGVGRDIVDADKVMITNEEEIKTTNPVATESYGQVATNHQSARAQAQTGWVQNQGILPGMVWQDRDVYLQGPIWAKIPHTDGNFHPSPLMGGFGMKHPPPQILIKNTPVPADPPTAFNGGKLNSFITQYSTGQVSVEIEWELQKENSKRWNPEIQYTSNYYKSNNVEFAVNTEGVYSEPRPIGTRYLTRNL

SEQ ID NO: 533 - DNA, 2208 bp, synthetic construct
  misc_feature 1..2208: note = Adeno Associated Virus Capsid Protein Variant
  source 1..2208: mol_type = other DNA
atggctgccgatggttatcttccagattggctcgaggacaaccttagtgaaggaattcgcgagtggtgggctttgaaacctggagcccctcaacccaaggcaaatcaacaacatcaagacaacgctcgaggtcttgtgcttccgggttacaaataccttggacccggcaacggactcgacaagggggagccggtcaacgcagcagacgcggcggccctcgagcacgacaaggcctacgaccagcagctcaaggccggagacaacccgtacctcaagtacaaccacgccgacgccgagttccaggagcggctcaaagaagatacgtcttttgggggcaacctcgggcgagcagtcttccaggccaaaaagaggcttcttgaacctcttggtctggttgaggaagcggctaagacggctcctggaaagaagaggcctgtagagcagtctcctcaggaaccggactcctccgcgggtattggcaaatcgggtgcacagcccgctaaaaagagactcaatttcggtcagactggcgacacagagtcagtcccagaccctcaaccaatcggagaacctcccgcagccccctcaggtgtgggatctcttacaatggcttcaggtggtggcgcaccagtggcagacaataacgaaggtgccgatggagtgggtagttcctcgggaaattggcattgcgattcccaatggctgggggacagagtcatcaccaccagcacccgaacctgggccctgcccacctacaacaatcacctctacaagcaaatctccaacagcacatctggaggatcttcaaatgacaacgcctacttcggctacagcaccccctgggggtattttgacttcaacagattccactgccacttctcaccacgtgactggcagcgactcatcaacaacaactggggattccggcctaagcgactcaacttcaagctcttcaacattcaggtcaaagaggttacggacaacaatggagtcaagaccatcgccaataaccttaccagcacggtccaggtcttcacggactcagactatcagctcccgtacgtgctcgggtcggctcacgagggctgcctcccgccgttcccagcggacgttttcatgattcctcagtacgggtatctgacgcttaatgatggaagccaggccgtgggtcgttcgtccttttactgcctggaatatttcccgtcgcaaatgctaagaacgggtaacaacttccagttcagctacgagtttgagaacgtacctttccatagcagctacgctcacagccaaagcctggaccgactaatgaatccactcatcgaccaatacttgtactatctctcaaagactattaacggttctggacagaatcaacaaacgctaaaattcagtgtggccggacccagcaacatggctgtccagggaagaaactacatacctggacccagctaccgacaacaacgtgtctcaaccactgtgactcaaaacaacaacagcgaatttgcttggcctggagcttcttcttgggctctcaatggacgtaatagcttgatgaatcctggacctgctatggccagccacaaagaaggagaggaccgtttctttcctttgtctggatctttaatttttggcaaacaaggaactggaagagacaacgtggatgcggacaaagtcatgataaccaacgaagaagaaattaaaactactaacccggtagcaacggagtcctatggacaagtggccacaaaccaccagagtgcccgggcacaggcgcagaccggctgggttcaaaaccaaggaatacttccgggtatggtttggcaggacagagatgtgtacctgcaaggacccatttgggccaaaattcctcacacggacggcaactttcacccttctccgctgatgggagggtttggaatgaagcacccgcctcctcagatcctcatcaaaaacacacctgtacctgcggatcctccaacgcacttcaacaagggcaagctgaactctttcatcacccagtattctactggccaagtcagcgtggagatcgagtgggagctgcagaaggaaaacagcaagcgctggaacccggagatccagtacacttccaactattacaagtctaataatgttgaatttgctgttaatactgaaggtgtatatagtgaaccccgccccattggcaccagatacctgactcgtaatctg

SEQ ID NO: 534 - protein, 736 aa, synthetic construct
  REGION 1..736: note = Adeno Associated Virus Capsid Protein Variant
MAADGYLPDWLEDNLSEGIREWWALKPGAPQPKANQQHQDNARGLVLPGYKYLGPGNGLDKGEPVNAADAAALEHDKAYDQQLKAGDNPYLKYNHADAEFQERLKEDTSFGGNLGRAVFQAKKRLLEPLGLVEEAAKTAPGKKRPVEQSPQEPDSSAGIGKSGAQPAKKRLNFGQTGDTESVPDPQPIGEPPAAPSGVGSLTMASGGGAPVADNNEGADGVGSSSGNWHCDSQWLGDRVITTSTRTWALPTYNNHLYKQISNSTSGGSSNDNAYFGYSTPWGYFDFNRFHCHFSPRDWQRLINNNWGFRPKRLNFKLFNIQVKEVTDNNGVKTIANNLTSTVQVFTDSDYQLPYVLGSAHEGCLPPFPADVFMIPQYGYLTLNDGSQAVGRSSFYCLEYFPSQMLRTGNNFQFSYEFENVPFHSSYAHSQSLDRLMNPLIDQYLYYLSKTINGSGQNQQTLKFSVAGPSNMAVQGRNYIPGPSYRQQRVSTTVTQNNNSEFAWPGASSWALNGRNSLMNPGPAMASHKEGEDRFFPLSGSLIFGKQGTGRDNVDADKVMITNEEEIKTTNPVATESYGQVATNHQSARAQAQTGWVQNQGILPGMVWQDRDVYLQGPIWAKIPHTDGNFHPSPLMGGFGMKHPPPQILIKNTPVPADPPTHFNKGKLNSFITQYSTGQVSVEIEWELQKENSKRWNPEIQYTSNYYKSNNVEFAVNTEGVYSEPRPIGTRYLTRNL

SEQ ID NO: 535 - DNA, 2208 bp, synthetic construct
  misc_feature 1..2208: note = Adeno Associated Virus Capsid Protein Variant
  source 1..2208: mol_type = other DNA
atggctgccgatggttatcttccagattggctcgaggacaaccttagtgaaggaattcgcgagtggtgggctttgaaacctggagcccctcaacccaaggcaaatcaacaacatcaagacaacgctcgaggtcttgtgcttccgggttacaaataccttggacccggcaacggactcgacaagggggagccggtcaacgcagcagacgcggcggccctcgagcacgacaaggcctacgaccagcagctcaaggccggagacaacccgtacctcaagtacaaccacgccgacgccgagttccaggagcggctcaaagaagatacgtcttttgggggcaacctcgggcgagcagtcttccaggccaaaaagaggcttcttgaacctcttggtctggttgaggaagcggctaagacggctcctggaaagaagaggcctgtagagcagtctcctcaggaaccggactcctccgcgggtattggcaaatcgggtgcacagcccgctaaaaagagactcaatttcggtcagactggcgacacagagtcagtcccagaccctcaaccaatcggagaacctcccgcagccccctcaggtgtgggatctcttacaatggcttcaggtggtggcgcaccagtggcagacaataacgaaggtgccgatggagtgggtagttcctcgggaaattggcattgcgattcccaatggctgggggacagagtcatcaccaccagcacccgaacctgggccctgcccacctacaacaatcacctctacaagcaaatctccaacagcacatctggaggatcttcaaatgacaacgcctacttcggctacagcaccccctgggggtattttgacttcaacagattccactgccacttctcaccacgtgactggcagcgactcatcaacaacaactggggattccggcctaagcgactcaacttcaagctcttcaacattcaggtcaaagaggttacggacaacaatggagtcaagaccatcgccaataaccttaccagcacggtccaggtcttcacggactcagactatcagctcccgtacgtgctcgggtcggctcacgagggctgcctcccgccgttcccagcggacgttttcatgattcctcagtacgggtatctgacgcttaatgatggaagccaggccgtgggtcgttcgtccttttactgcctggaatatttcccgtcgcaaatgctaagaacgggtaacaacttccagttcagctacgagtttgagaacgtacctttccatagcagctacgctcacagccaaagcctggaccgactaatgaatccactcatcgaccaatacttgtactatctctcaaagactattaacggttctggacagaatcaacaaacgctaaaattcagtgtggccggacccagcaacatggctgtccagggaagaaactacatacctggacccagctaccgacaacaacgtgtctcaaccactgtgactcaaaacagcaacagcgaatttgcttggccttacgcttcttcttgggctctcaatggacgtaatagcttgatgaatcctggacctgctatggccagccacaaagaaggagaggaccgtttctttcctttgtctggatctttaatttttggcaaacaaggaactggaagagacaacgtggatgcggacaaagtcatgataaccaacgaagaagaaattaaaactactaacccggtagcaacggagtcctatggacaagtggccacaaaccaccagattgcccgggcacaggcgcagaccggctgggttcaaaaccaaggaatacttccgggtatggtttggcaggacagagatgtgtacctgcaaggacccatttgggccaaaattcctcacacggacggcaactttcacccttctccgctgatgggagggtttggaatgaagcacccgcctcctcagatcctcatcaaaaacacacctgtacctgcggatcctccaacggccttcaacaagggcaagctgaactctttcatcacccagtattctactggccaagtcagcgtggagatcgagtgggagctgcagaaggaaaacagcaagcgctggaacccggagatccagtacacttccaactattacaagtctaataatgttgaatttgctgttaatactgaaggtgtatatagtgaaccccgccccattggcaccagatacctgactcgtaatctg

SEQ ID NO: 536 - protein, 736 aa, synthetic construct
  REGION 1..736: note = Adeno Associated Virus Capsid Protein Variant
MAADGYLPDWLEDNLSEGIREWWALKPGAPQPKANQQHQDNARGLVLPGYKYLGPGNGLDKGEPVNAADAAALEHDKAYDQQLKAGDNPYLKYNHADAEFQERLKEDTSFGGNLGRAVFQAKKRLLEPLGLVEEAAKTAPGKKRPVEQSPQEPDSSAGIGKSGAQPAKKRLNFGQTGDTESVPDPQPIGEPPAAPSGVGSLTMASGGGAPVADNNEGADGVGSSSGNWHCDSQWLGDRVITTSTRTWALPTYNNHLYKQISNSTSGGSSNDNAYFGYSTPWGYFDFNRFHCHFSPRDWQRLINNNWGFRPKRLNFKLFNIQVKEVTDNNGVKTIANNLTSTVQVFTDSDYQLPYVLGSAHEGCLPPFPADVFMIPQYGYLTLNDGSQAVGRSSFYCLEYFPSQMLRTGNNFQFSYEFENVPFHSSYAHSQSLDRLMNPLIDQYLYYLSKTINGSGQNQQTLKFSVAGPSNMAVQGRNYIPGPSYRQQRVSTTVTQNSNSEFAWPYASSWALNGRNSLMNPGPAMASHKEGEDRFFPLSGSLIFGKQGTGRDNVDADKVMITNEEEIKTTNPVATESYGQVATNHQIARAQAQTGWVQNQGILPGMVWQDRDVYLQGPIWAKIPHTDGNFHPSPLMGGFGMKHPPPQILIKNTPVPADPPTAFNKGKLNSFITQYSTGQVSVEIEWELQKENSKRWNPEIQYTSNYYKSNNVEFAVNTEGVYSEPRPIGTRYLTRNL

SEQ ID NO: 537 - DNA, 2208 bp, synthetic construct
  misc_feature 1..2208: note = Adeno Associated Virus Capsid Protein Variant
  source 1..2208: mol_type = other DNA
atggctgccgatggttatcttccagattggctcgaggacaaccttagtgaaggaattcgcgagtggtgggctttgaaacctggagcccctcaacccaaggcaaatcaacaacatcaagacaacgctcgaggtcttgtgcttccgggttacaaataccttggacccggcaacggactcgacaagggggagccggtcaacgcagcagacgcggcggccctcgagcacgacaaggcctacgaccagcagctcaaggccggagacaacccgtacctcaagtacaaccacgccgacgccgagttccaggagcggctcaaagaagatacgtcttttgggggcaacctcgggcgagcagtcttccaggccaaaaagaggcttcttgaacctcttggtctggttgaggaagcggctaagacggctcctggaaagaagaggcctgtagagcagtctcctcaggaaccggactcctccgcgggtattggcaaatcgggtgcacagcccgctaaaaagagactcaatttcggtcagactggcgacacagagtcagtcccagaccctcaaccaatcggagaacctcccgcagccccctcaggtgtgggatctcttacaatggcttcaggtggtggcgcaccagtggcagacaataacgaaggtgccgatggagtgggtagttcctcgggaaattggcattgcgattcccaatggctgggggacagagtcatcaccaccagcacccgaacctgggccctgcccacctacaacaatcacctctacaagcaaatctccaacagcacatctggaggatcttcaaatgacaacgcctacttcggctacagcaccccctgggggtattttgacttcaacagattccactgccacttctcaccacgtgactggcagcgactcatcaacaacaactggggattccggcctaagcgactcaacttcaagctcttcaacattcaggtcaaagaggttacggacaacaatggagtcaagaccatcgccaataaccttaccagcacggtccaggtcttcacggactcagactatcagctcccgtacgtgctcgggtcggctcacgagggctgcctcccgccgttcccagcggacgttttcatgattcctcagtacgggtatctgacgcttaatgatggaagccaggccgtgggtcgttcgtccttttactgcctggaatatttcccgtcgcaaatgctaagaacgggtaacaacttccagttcagctacgagtttgagaacgtacctttccatagcagctacgctcacagccaaagcctggaccgactaatgaatccactcatcgaccaatacttgtactatctctcaaagactattaacggttctggacagaatcaacaaacgctaaaattcagtgtggccggacccagcaacatggctgtccagggaagaaactacatacctggacccagctaccgacaacaacgtgtctcaaccactgtgacttttaacaacaacagcgaatttgcttggcctggagcttcttcttgggctctcaatggacgtaatagcttgatgaatcctggacctgctatggccagccacaaagaaggagaggaccgtttctttcctttgtctggatctttaatttttggcaaacaaggaactggaagagacaacgtggatgcggacaaagtcatgataaccaacgaagaagaaattaaaactactaacccggtagcaacggagtcctatggacaagtggccacaaaccaccagagtgcccgggcacaggcgcagaccggctgggttcaaaaccaaggaatacttccgggtatggtttggcaggacagagatgtgtacctgcaaggacccatttgggccaaaattcctcacacggacggcaactttcacccttctccgctgatgggagggtttggaatgaagcacccgcctcctcagatcctcatcaaaaacacacctgtacctgcggatcctccaacggccttcaacaagggcaagctgaactctttcatcacccagtattctactggccaagtcagcgtggagatcgagtgggagctgcagaaggaaaacagcaagcgctggaacccggagatccagtacacttccaactattacaagtctaataatgttgaatttgctgttaatactgaaggtgtatatagtgaaccccgccccattggcaccagatacctgactcgtaatctg

SEQ ID NO: 538 - protein, 736 aa, synthetic construct
  REGION 1..736: note = Adeno Associated Virus Capsid Protein Variant
MAADGYLPDWLEDNLSEGIREWWALKPGAPQPKANQQHQDNARGLVLPGYKYLGPGNGLDKGEPVNAADAAALEHDKAYDQQLKAGDNPYLKYNHADAEFQERLKEDTSFGGNLGRAVFQAKKRLLEPLGLVEEAAKTAPGKKRPVEQSPQEPDSSAGIGKSGAQPAKKRLNFGQTGDTESVPDPQPIGEPPAAPSGVGSLTMASGGGAPVADNNEGADGVGSSSGNWHCDSQWLGDRVITTSTRTWALPTYNNHLYKQISNSTSGGSSNDNAYFGYSTPWGYFDFNRFHCHFSPRDWQRLINNNWGFRPKRLNFKLFNIQVKEVTDNNGVKTIANNLTSTVQVFTDSDYQLPYVLGSAHEGCLPPFPADVFMIPQYGYLTLNDGSQAVGRSSFYCLEYFPSQMLRTGNNFQFSYEFENVPFHSSYAHSQSLDRLMNPLIDQYLYYLSKTINGSGQNQQTLKFSVAGPSNMAVQGRNYIPGPSYRQQRVSTTVTFNNNSEFAWPGASSWALNGRNSLMNPGPAMASHKEGEDRFFPLSGSLIFGKQGTGRDNVDADKVMITNEEEIKTTNPVATESYGQVATNHQSARAQAQTGWVQNQGILPGMVWQDRDVYLQGPIWAKIPHTDGNFHPSPLMGGFGMKHPPPQILIKNTPVPADPPTAFNKGKLNSFITQYSTGQVSVEIEWELQKENSKRWNPEIQYTSNYYKSNNVEFAVNTEGVYSEPRPIGTRYLTRNL

SEQ ID NO: 539 - DNA, 2208 bp, synthetic construct
  misc_feature 1..2208: note = Adeno Associated Virus Capsid Protein Variant
  source 1..2208: mol_type = other DNA
atggctgccgatggttatcttccagattggctcgaggacaaccttagtgaaggaattcgcgagtggtgggctttgaaacctggagcccctcaacccaaggcaaatcaacaacatcaagacaacgctcgaggtcttgtgcttccgggttacaaataccttggacccggcaacggactcgacaagggggagccggtcaacgcagcagacgcggcggccctcgagcacgacaaggcctacgaccagcagctcaaggccggagacaacccgtacctcaagtacaaccacgccgacgccgagttccaggagcggctcaaagaagatacgtcttttgggggcaacctcgggcgagcagtcttccaggccaaaaagaggcttcttgaacctcttggtctggttgaggaagcggctaagacggctcctggaaagaagaggcctgtagagcagtctcctcaggaaccggactcctccgcgggtattggcaaatcgggtgcacagcccgctaaaaagagactcaatttcggtcagactggcgacacagagtcagtcccagaccctcaaccaatcggagaacctcccgcagccccctcaggtgtgggatctcttacaatggcttcaggtggtggcgcaccagtggcagacaataacgaaggtgccgatggagtgggtagttcctcgggaaattggcattgcgattcccaatggctgggggacagagtcatcaccaccagcacccgaacctgggccctgcccacctacaacaatcacctctacaagcaaatctccaacagcacatctggaggatcttcaaatgacaacgcctacttcggctacagcaccccctgggggtattttgacttcaacagattccactgccacttctcaccacgtgactggcagcgactcatcaacaacaactggggattccggcctaagcgactcaacttcaagctcttcaacattcaggtcaaagaggttacggacaacaatggagtcaagaccatcgccaataaccttaccagcacggtccaggtcttcacggactcagactatcagctcccgtacgtgctcgggtcggctcacgagggctgcctcccgccgttcccagcggacgttttcatgattcctcagtacgggtatctgacgcttaatgatggaagccaggccgtgggtcgttcgtccttttactgcctggaatatttcccgtcgcaaatgctaagaacgggtaacaacttccagttcagctacgagtttgagaacgtacctttccatagcagctacgctcacagccaaagcctggaccgactaatgaatccactcatcgaccaatacttgtactatctctcaaagactattaacggttctggacagaatcaacaaacgctaaaattcagtgtggccggacccagcaacatggctgtccagggaagaaactacatacctggacccagctaccgacaacaacgtgtctcaaccactgtgactcaaaacaacaacagcgaatttgcttggcctggagcttcttcttgggctctcaatggacgtaatagcttgatgaatcctggacctgctatggccagccacaaagaaggagaggaccgtttctttcctttgtctggatctttaatttttggcaaacaaggaactggaagagacaacgtggattgggacaaagtcatgataaccaacgaagaagaaattaaaactactaacccggtagcaacggagtcctatggacaagtggccacaaaccaccagagtgcccgggcacaggcgcagaccggctgggttcaaaaccaaggaatacttccgggtatggtttggcaggacagagatgtgtacctgcaaggacccatttgggccaaaattcctcacacggacggcaactttcacccttctccgctgatgggagggtttggaatgaagcacccgcctcctcagatcctcatcaaaaacacacctgtacctgcggatcctccaacggccttcaacaagggcaagctgaactctttcatcacccagtattctactggccaagtcagcgtggagatcgagtgggagctgcagaaggaaaacagcaagcgctggaacccggagatccagtacacttccaactattacaagtctaataatgttgaatttgctgttaatactgaaggtgtatatagtgaaccccgccccattggcaccagatacctgactcgtaatctg

SEQ ID NO: 540 - protein, 736 aa, synthetic construct
  REGION 1..736: note = Adeno Associated Virus Capsid Protein Variant
MAADGYLPDWLEDNLSEGIREWWALKPGAPQPKANQQHQDNARGLVLPGYKYLGPGNGLDKGEPVNAADAAALEHDKAYDQQLKAGDNPYLKYNHADAEFQERLKEDTSFGGNLGRAVFQAKKRLLEPLGLVEEAAKTAPGKKRPVEQSPQEPDSSAGIGKSGAQPAKKRLNFGQTGDTESVPDPQPIGEPPAAPSGVGSLTMASGGGAPVADNNEGADGVGSSSGNWHCDSQWLGDRVITTSTRTWALPTYNNHLYKQISNSTSGGSSNDNAYFGYSTPWGYFDFNRFHCHFSPRDWQRLINNNWGFRPKRLNFKLFNIQVKEVTDNNGVKTIANNLTSTVQVFTDSDYQLPYVLGSAHEGCLPPFPADVFMIPQYGYLTLNDGSQAVGRSSFYCLEYFPSQMLRTGNNFQFSYEFENVPFHSSYAHSQSLDRLMNPLIDQYLYYLSKTINGSGQNQQTLKFSVAGPSNMAVQGRNYIPGPSYRQQRVSTTVTQNNNSEFAWPGASSWALNGRNSLMNPGPAMASHKEGEDRFFPLSGSLIFGKQGTGRDNVDWDKVMITNEEEIKTTNPVATESYGQVATNHQSARAQAQTGWVQNQGILPGMVWQDRDVYLQGPIWAKIPHTDGNFHPSPLMGGFGMKHPPPQILIKNTPVPADPPTAFNKGKLNSFITQYSTGQVSVEIEWELQKENSKRWNPEIQYTSNYYKSNNVEFAVNTEGVYSEPRPIGTRYLTRNL

SEQ ID NO: 541 - DNA, 2208 bp, synthetic construct
  misc_feature 1..2208: note = Adeno Associated Virus Capsid Protein Variant
  source 1..2208: mol_type = other DNA
atggctgccgatggttatcttccagattggctcgaggacaaccttagtgaaggaattcgcgagtggtgggctttgaaacctggagcccctcaacccaaggcaaatcaacaacatcaagacaacgctcgaggtcttgtgcttccgggttacaaataccttggacccggcaacggactcgacaagggggagccggtcaacgcagcagacgcggcggccctcgagcacgacaaggcctacgaccagcagctcaaggccggagacaacccgtacctcaagtacaaccacgccgacgccgagttccaggagcggctcaaagaagatacgtcttttgggggcaacctcgggcgagcagtcttccaggccaaaaagaggcttcttgaacctcttggtctggttgaggaagcggctaagacggctcctggaaagaagaggcctgtagagcagtctcctcaggaaccggactcctccgcgggtattggcaaatcgggtgcacagcccgctaaaaagagactcaatttcggtcagactggcgacacagagtcagtcccagaccctcaaccaatcggagaacctcccgcagccccctcaggtgtgggatctcttacaatggcttcaggtggtggcgcaccagtggcagacaataacgaaggtgccgatggagtgggtagttcctcgggaaattggcattgcgattcccaatggctgggggacagagtcatcaccaccagcacccgaacctgggccctgcccacctacaacaatcacctctacaagcaaatctccaacagcacatctggaggatcttcaaatgacaacgcctacttcggctacagcaccccctgggggtattttgacttcaacagattccactgccacttctcaccacgtgactggcagcgactcatcaacaacaactggggattccggcctaagcgactcaacttcaagctcttcaacattcaggtcaaagaggttacggacaacaatggagtcaagaccatcgccaataaccttaccagcacggtccaggtcttcacggactcagactatcagctcccgtacgtgctcgggtcggctcacgagggctgcctcccgccgttcccagcggacgttttcatgattcctcagtacgggtatctgacgcttaatgatggaagccaggccgtgggtcgttcgtccttttactgcctggaatatttcccgtcgcaaatgctaagaacgggtaacaacttccagttcagctacgagtttgagaacgtacctttccatagcagctacgctcacagccaaagcctggaccgactaatgaatccactcatcgaccaatacttgtactatctctcaaagactattaacggttctggacagaatcaacaaacgctaaaattcagtgtggccggacccagcaacatggctgtccagggaagaaactacatacctggacccagctaccgacaacaacgtgtctcaaccactgtgactcaaaacaacaacagcgaatttgcttggcctggagcttcttcttgggctctcaatggacgtaatagcttgatgaatcctggacctgctatggccagccacaaagaaggagaggaccgtttctttcctttgtctggatctttaatttttggcaaacaaggaactggaagagacaacgtggatgcggacaaagtcatgataaccaacgaagaagaaattaaaactactaacccggtagcaacggagtcctatggacaagtggccacaaaccacatgagtgcccgggcacaggcgcagaccggctgggttcaaaaccaaggaatacttccgggtatggtttggcaggacagagatgtgtacctgcaaggacccatttgggccaaaattcctcacacggacggcaactttcacccttctccgctgatgggagggtttggaatgaagcacccgcctcctcagatcctcatcaaaaacacacctgtacctgcggatcctccaacggccttcaacaagggcaagctgaactctttcatcacccagtattctactggccaagtcagcgtggagatcgagtgggagctgcagaaggaaaacagcaagcgctggaacccggagatccagtacacttccaactattggaagtctaataatgttgaatttgctgttaatactgaaggtgtatatagtgaaccccgccccattggcaccagatacctgactcgtaatctg

SEQ ID NO: 542 - protein, 736 aa, synthetic construct
  REGION 1..736: note = Adeno Associated Virus Capsid Protein Variant
MAADGYLPDWLEDNLSEGIREWWALKPGAPQPKANQQHQDNARGLVLPGYKYLGPGNGLDKGEPVNAADAAALEHDKAYDQQLKAGDNPYLKYNHADAEFQERLKEDTSFGGNLGRAVFQAKKRLLEPLGLVEEAAKTAPGKKRPVEQSPQEPDSSAGIGKSGAQPAKKRLNFGQTGDTESVPDPQPIGEPPAAPSGVGSLTMASGGGAPVADNNEGADGVGSSSGNWHCDSQWLGDRVITTSTRTWALPTYNNHLYKQISNSTSGGSSNDNAYFGYSTPWGYFDFNRFHCHFSPRDWQRLINNNWGFRPKRLNFKLFNIQVKEVTDNNGVKTIANNLTSTVQVFTDSDYQLPYVLGSAHEGCLPPFPADVFMIPQYGYLTLNDGSQAVGRSSFYCLEYFPSQMLRTGNNFQFSYEFENVPFHSSYAHSQSLDRLMNPLIDQYLYYLSKTINGSGQNQQTLKFSVAGPSNMAVQGRNYIPGPSYRQQRVSTTVTQNNNSEFAWPGASSWALNGRNSLMNPGPAMASHKEGEDRFFPLSGSLIFGKQGTGRDNVDADKVMITNEEEIKTTNPVATESYGQVATNHMSARAQAQTGWVQNQGILPGMVWQDRDVYLQGPIWAKIPHTDGNFHPSPLMGGFGMKHPPPQILIKNTPVPADPPTAFNKGKLNSFITQYSTGQVSVEIEWELQKENSKRWNPEIQYTSNYWKSNNVEFAVNTEGVYSEPRPIGTRYLTRNL

SEQ ID NO: 543 - DNA, 2208 bp, synthetic construct
  misc_feature 1..2208: note = Adeno Associated Virus Capsid Protein Variant
  source 1..2208: mol_type = other DNA
atggctgccgatggttatcttccagattggctcgaggacaaccttagtgaaggaattcgcgagtggtgggctttgaaacctggagcccctcaacccaaggcaaatcaacaacatcaagacaacgctcgaggtcttgtgcttccgggttacaaataccttggacccggcaacggactcgacaagggggagccggtcaacgcagcagacgcggcggccctcgagcacgacaaggcctacgaccagcagctcaaggccggagacaacccgtacctcaagtacaaccacgccgacgccgagttccaggagcggctcaaagaagatacgtcttttgggggcaacctcgggcgagcagtcttccaggccaaaaagaggcttcttgaacctcttggtctggttgaggaagcggctaagacggctcctggaaagaagaggcctgtagagcagtctcctcaggaaccggactcctccgcgggtattggcaaatcgggtgcacagcccgctaaaaagagactcaatttcggtcagactggcgacacagagtcagtcccagaccctcaaccaatcggagaacctcccgcagccccctcaggtgtgggatctcttacaatggcttcaggtggtggcgcaccagtggcagacaataacgaaggtgccgatggagtgggtagttcctcgggaaattggcattgcgattcccaatggctgggggacagagtcatcaccaccagcacccgaacctgggccctgcccacctacaacaatcacctctacaagcaaatctccaacagcacatctggaggatcttcaaatgacaacgcctacttcggctacagcaccccctgggggtattttgacttcaacagattccactgccacttctcaccacgtgactggcagcgactcatcaacaacaactggggattccggcctaagcgactcaacttcaagctcttcaacattcaggtcaaagaggttacggacaacaatggagtcaagaccatcgccaataaccttaccagcacggtccaggtcttcacggactcagactatcagctcccgtacgtgctcgggtcggctcacgagggctgcctcccgccgttcccagcggacgttttcatgattcctcagtacgggtatctgacgcttaatgatggaagccaggccgtgggtcgttcgtccttttactgcctggaatatttcccgtcgcaaatgctaagaacgggtaacaacttccagttcagctacgagtttgagaacgtacctttccatagcagctacgctcacagccaaagcctggaccgactaatgaatccactcatcgaccaatacttgtactatctctcaaagactattaacggttctggatttaatcaacaaacgctaaaattcagtgtggccggacccagcaacatggctgtccagggaagaaactacatacctggacccagctaccgacaacaacgtgtctcaaccactgtgactcaaaacaacaacagcgaatttgcttggcctggagcttcttcttgggctctcaatggacgtaatagcttgatgaatcctggacctgctatggccagccacaaagaaggagaggaccgtttctttcctttgtctggatctttaatttttggcaaacaaggaactggaagagacaacgtggatgcggacaaagtcatgataaccaacgaagaagaaattaaaactactaacccggtagcaacggagtcctatggacaagtggccacaaaccaccagagtgcccgggcacaggcgcagaccggctgggttcaaaaccaaggaatacttccgggtatggtttggcaggacagagatgtgtacctgcaaggacccatttgggccaaaattcctcacacggacggcaactttcacccttctccgctgatgggagggtttggaatgaagcacccgcctcctcagatcctcatcaaaaacacacctgtacctgcggatcctccaacggccttcaacaagggcaagctgaactctttcatcacccagtattctactggccaagtcagcgtggagatcgagtgggagctgcagaaggaaaacagcaagcgctggaacccggagatccagtacacttccaactattacaagtctaataatgttgaatttgctgttaatactgaaggtgtatatagtgaaccccgccccattggcaccagatacctgactcgtaatctg

SEQ ID NO: 544 - protein, 736 aa, synthetic construct
  REGION 1..736: note = Adeno Associated Virus Capsid Protein Variant
MAADGYLPDWLEDNLSEGIREWWALKPGAPQPKANQQHQDNARGLVLPGYKYLGPGNGLDKGEPVNAADAAALEHDKAYDQQLKAGDNPYLKYNHADAEFQERLKEDTSFGGNLGRAVFQAKKRLLEPLGLVEEAAKTAPGKKRPVEQSPQEPDSSAGIGKSGAQPAKKRLNFGQTGDTESVPDPQPIGEPPAAPSGVGSLTMASGGGAPVADNNEGADGVGSSSGNWHCDSQWLGDRVITTSTRTWALPTYNNHLYKQISNSTSGGSSNDNAYFGYSTPWGYFDFNRFHCHFSPRDWQRLINNNWGFRPKRLNFKLFNIQVKEVTDNNGVKTIANNLTSTVQVFTDSDYQLPYVLGSAHEGCLPPFPADVFMIPQYGYLTLNDGSQAVGRSSFYCLEYFPSQMLRTGNNFQFSYEFENVPFHSSYAHSQSLDRLMNPLIDQYLYYLSKTINGSGFNQQTLKFSVAGPSNMAVQGRNYIPGPSYRQQRVSTTVTQNNNSEFAWPGASSWALNGRNSLMNPGPAMASHKEGEDRFFPLSGSLIFGKQGTGRDNVDADKVMITNEEEIKTTNPVATESYGQVATNHQSARAQAQTGWVQNQGILPGMVWQDRDVYLQGPIWAKIPHTDGNFHPSPLMGGFGMKHPPPQILIKNTPVPADPPTAFNKGKLNSFITQYSTGQVSVEIEWELQKENSKRWNPEIQYTSNYYKSNNVEFAVNTEGVYSEPRPIGTRYLTRNL

SEQ ID NO: 545 - DNA, 2208 bp, synthetic construct
  misc_feature 1..2208: note = Adeno Associated Virus Capsid Protein Variant
  source 1..2208: mol_type = other DNA
atggctgccgatggttatcttccagattggctcgaggacaaccttagtgaaggaattcgcgagtggtgggctttgaaacctggagcccctcaacccaaggcaaatcaacaacatcaagacaacgctcgaggtcttgtgcttccgggttacaaataccttggacccggcaacggactcgacaagggggagccggtcaacgcagcagacgcggcggccctcgagcacgacaaggcctacgaccagcagctcaaggccggagacaacccgtacctcaagtacaaccacgccgacgccgagttccaggagcggctcaaagaagatacgtcttttgggggcaacctcgggcgagcagtcttccaggccaaaaagaggcttcttgaacctcttggtctggttgaggaagcggctaagacggctcctggaaagaagaggcctgtagagcagtctcctcaggaaccggactcctccgcgggtattggcaaatcgggtgcacagcccgctaaaaagagactcaatttcggtcagactggcgacacagagtcagtcccagaccctcaaccaatcggagaacctcccgcagccccctcaggtgtgggatctcttacaatggcttcaggtggtggcgcaccagtggcagacaataacgaaggtgccgatggagtgggtagttcctcgggaaattggcattgcgattcccaatggctgggggacagagtcatcaccaccagcacccgaacctgggccctgcccacctacaacaatcacctctacaagcaaatctccaacagcacatctggaggatcttcaaatgacaacgcctacttcggctacagcaccccctgggggtattttgacttcaacagattccactgccacttctcaccacgtgactggcagcgactcatcaacaacaactggggattccggcctaagcgactcaacttcaagctcttcaacattcaggtcaaagaggttacggacaacaatggagtcaagaccatcgccaataaccttaccagcacggtccaggtcttcacggactcagactatcagctcccgtacgtgctcgggtcggctcacgagggctgcctcccgccgttcccagcggacgttttcatgattcctcagtacgggtatctgacgcttaatgatggaagccaggccgtgggtcgttcgtccttttactgcctggaatatttcccgtcgcaaatgctaagaacgggtaacaacttccagttcagctacgagtttgagaacgtacctttccatagcagctacgctcacagccaaagcctggaccgactaatgaatccactcatcgaccaatacttgtactatctctcaaagactattaacggttctggacagaatcaacaaacgctaaaattcagtgtggccggacccagcaacatggctgtccagggaagaaactacatacctggacccagctaccgacaacaacgtgtctcaaccactgtgactcaaaacaacaacagcgaatttgcttggcctggagcttcttcttgggctctcaatggacgtaatagcttgatgaatcctggacctgctatggccagccacaaagaaggagaggaccgtttctttcctttgtctggatctttaatttttggcaaacaaggaactggaagagacaacgtggatgcggacaaagtcatgataaccaacgaagaagaaattaaaactactaacccggtagcaacggagtcctatggacaagtggccacaaaccaccagagtgcccgggcacaggcgcagaccggctgggttcaaaaccaaggaatacttccgggtatggtttggcaggacagagatgtgtacctgcaaggacccatttgggccaaaattcctcacacggacggcaactttcacccttctccgctgatgggagggtttggaatgaagcacccgcctcctcagatcctcatcaaaaacacacctgtacctgcggatcctccaacggccttcaacaagggcaagctgaactctttcatcacccagtattctactggccaagtcagcgtggagatcgagtgggagctgcagaaggaaaacagcaagcgctggaacccggagatccagtacacttccaactattggaagtctaataatgttgaatttgctgttaatactgaaggtgtatatagtgaaccccgccccattggcaccagatacctgactcgtaatctg

SEQ ID NO: 546 - protein, 736 aa, synthetic construct
  REGION 1..736: note = Adeno Associated Virus Capsid Protein Variant
MAADGYLPDWLEDNLSEGIREWWALKPGAPQPKANQQHQDNARGLVLPGYKYLGPGNGLDKGEPVNAADAAALEHDKAYDQQLKAGDNPYLKYNHADAEFQERLKEDTSFGGNLGRAVFQAKKRLLEPLGLVEEAAKTAPGKKRPVEQSPQEPDSSAGIGKSGAQPAKKRLNFGQTGDTESVPDPQPIGEPPAAPSGVGSLTMASGGGAPVADNNEGADGVGSSSGNWHCDSQWLGDRVITTSTRTWALPTYNNHLYKQISNSTSGGSSNDNAYFGYSTPWGYFDFNRFHCHFSPRDWQRLINNNWGFRPKRLNFKLFNIQVKEVTDNNGVKTIANNLTSTVQVFTDSDYQLPYVLGSAHEGCLPPFPADVFMIPQYGYLTLNDGSQAVGRSSFYCLEYFPSQMLRTGNNFQFSYEFENVPFHSSYAHSQSLDRLMNPLIDQYLYYLSKTINGSGQNQQTLKFSVAGPSNMAVQGRNYIPGPSYRQQRVSTTVTQNNNSEFAWPGASSWALNGRNSLMNPGPAMASHKEGEDRFFPLSGSLIFGKQGTGRDNVDADKVMITNEEEIKTTNPVATESYGQVATNHQSARAQAQTGWVQNQGILPGMVWQDRDVYLQGPIWAKIPHTDGNFHPSPLMGGFGMKHPPPQILIKNTPVPADPPTAFNKGKLNSFITQYSTGQVSVEIEWELQKENSKRWNPEIQYTSNYWKSNNVEFAVNTEGVYSEPRPIGTRYLTRNL

SEQ ID NO: 547 - DNA, 2208 bp, synthetic construct
  misc_feature 1..2208: note = Adeno Associated Virus Capsid Protein Variant
  source 1..2208: mol_type = other DNA
atggctgccgatggttatcttccagattggctcgaggacaaccttagtgaaggaattcgcgagtggtgggctttgaaacctggagcccctcaacccaaggcaaatcaacaacatcaagacaacgctcgaggtcttgtgcttccgggttacaaataccttggacccggcaacggactcgacaagggggagccggtcaacgcagcagacgcggcggccctcgagcacgacaaggcctacgaccagcagctcaaggccggagacaacccgtacctcaagtacaaccacgccgacgccgagttccaggagcggctcaaagaagatacgtcttttgggggcaacctcgggcgagcagtcttccaggccaaaaagaggcttcttgaacctcttggtctggttgaggaagcggctaagacggctcctggaaagaagaggcctgtagagcagtctcctcaggaaccggactcctccgcgggtattggcaaatcgggtgcacagcccgctaaaaagagactcaatttcggtcagactggcgacacagagtcagtcccagaccctcaaccaatcggagaacctcccgcagccccctcaggtgtgggatctcttacaatggcttcaggtggtggcgcaccagtggcagacaataacgaaggtgccgatggagtgggtagttcctcgggaaattggcattgcgattcccaatggctgggggacagagtcatcaccaccagcacccgaacctgggccctgcccacctacaacaatcacctctacaagcaaatctccaacagcacatctggaggatcttcaaatgacaacgcctacttcggctacagcaccccctgggggtattttgacttcaacagattccactgccacttctcaccacgtgactggcagcgactcatcaacaacaactggggattccggcctaagcgactcaacttcaagctcttcaacattcaggtcaaagaggttacggacaacaatggagtcaagaccatcgccaataaccttaccagcacggtccaggtcttcacggactcagactatcagctcccgtacgtgctcgggtcggctcacgagggctgcctcccgccgttcccagcggacgttttcatgattcctcagtacgggtatctgacgcttaatgatggaagccaggccgtgggtcgttcgtccttttactgcctggaatatttcccgtcgcaaatgctaagaacgggtaacaacttccagttcagctacacgtttgagaacgtacctttccatagcagctacgctcacagccaaagcctggaccgactaatgaatccactcatcgaccaatacttgtactatctctcaaagactattaacggttctggacagaatcaacaaacgctaaaattcagtgtggccggacccagcaacatggctgtccagggaagaaactacatacctggacccagctaccgacaacaacgtgtctcaaccactgtgactcaaaacaacaacagcgaatttgcttggcctggagcttcttcttgggctctcaatggacgtaatagcttgatgaatcctggacctgctatggccagccacaaagaaggagaggaccgtttctttcctttgtctggatctttaatttttggcaaacaaggaactggaagagacaacgtggatgcggacaaagtcatgataaccaacgaagaagaaattaaaactactaacccggtagcaacggagtcctatggacaagtggccacaaaccaccagagtgcccgggcacaggcgcagaccggctgggttcaaaaccaaggaatacttccgggtatggtttggcaggacagagatgtgtacctgcaaggacccatttgggccaaaattcctcacacggacggcaactttcacccttctccgctgatgggagggtttggactgaagcacccgcctcctcagatcctcatcaaaaacacacctgtacctgcggatcctccaacggccttcaacaagggcaagctgaactctttcatcacccagtattctactggccaagtcagcgtggagatcgagtgggagctgcagaaggaaaacagcaagcgctggaacccggagatccagtacacttccaactattacaagtctaataatgttgaatttgctgttaatactgaaggtgtatatagtgaaccccgccccattggcaccagatacctgactcgtaatctg

SEQ ID NO: 548 - protein, 736 aa, synthetic construct
  REGION 1..736: note = Adeno Associated Virus Capsid Protein Variant
MAADGYLPDWLEDNLSEGIREWWALKPGAPQPKANQQHQDNARGLVLPGYKYLGPGNGLDKGEPVNAADAAALEHDKAYDQQLKAGDNPYLKYNHADAEFQERLKEDTSFGGNLGRAVFQAKKRLLEPLGLVEEAAKTAPGKKRPVEQSPQEPDSSAGIGKSGAQPAKKRLNFGQTGDTESVPDPQPIGEPPAAPSGVGSLTMASGGGAPVADNNEGADGVGSSSGNWHCDSQWLGDRVITTSTRTWALPTYNNHLYKQISNSTSGGSSNDNAYFGYSTPWGYFDFNRFHCHFSPRDWQRLINNNWGFRPKRLNFKLFNIQVKEVTDNNGVKTIANNLTSTVQVFTDSDYQLPYVLGSAHEGCLPPFPADVFMIPQYGYLTLNDGSQAVGRSSFYCLEYFPSQMLRTGNNFQFSYTFENVPFHSSYAHSQSLDRLMNPLIDQYLYYLSKTINGSGQNQQTLKFSVAGPSNMAVQGRNYIPGPSYRQQRVSTTVTQNNNSEFAWPGASSWALNGRNSLMNPGPAMASHKEGEDRFFPLSGSLIFGKQGTGRDNVDADKVMITNEEEIKTTNPVATESYGQVATNHQSARAQAQTGWVQNQGILPGMVWQDRDVYLQGPIWAKIPHTDGNFHPSPLMGGFGLKHPPPQILIKNTPVPADPPTAFNKGKLNSFITQYSTGQVSVEIEWELQKENSKRWNPEIQYTSNYYKSNNVEFAVNTEGVYSEPRPIGTRYLTRNL

SEQ ID NO: 549 - DNA, 2208 bp, synthetic construct
  misc_feature 1..2208: note = Adeno Associated Virus Capsid Protein Variant
  source 1..2208: mol_type = other DNA
atggctgccgatggttatcttccagattggctcgaggacaaccttagtgaaggaattcgcgagtggtgggctttgaaacctggagcccctcaacccaaggcaaatcaacaacatcaagacaacgctcgaggtcttgtgcttccgggttacaaataccttggacccggcaacggactcgacaagggggagccggtcaacgcagcagacgcggcggccctcgagcacgacaaggcctacgaccagcagctcaaggccggagacaacccgtacctcaagtacaaccacgccgacgccgagttccaggagcggctcaaagaagatacgtcttttgggggcaacctcgggcgagcagtcttccaggccaaaaagaggcttcttgaacctcttggtctggttgaggaagcggctaagacggctcctggaaagaagaggcctgtagagcagtctcctcaggaaccggactcctccgcgggtattggcaaatcgggtgcacagcccgctaaaaagagactcaatttcggtcagactggcgacacagagtcagtcccagaccctcaaccaatcggagaacctcccgcagccccctcaggtgtgggatctcttacaatggcttcaggtggtggcgcaccagtggcagacaataacgaaggtgccgatggagtgggtagttcctcgggaaattggcattgcgattcccaatggctgggggacagagtcatcaccaccagcacccgaacctgggccctgcccacctacaacaatcacctctacaagcaaatctccaacagcacatctggaggatcttcaaatgacaacgcctacttcggctacagcaccccctgggggtattttgacttcaacagattccactgccacttctcaccacgtgactggcagcgactcatcaacaacaactggggattccggcctaagcgactcaacttcaagctcttcaacattcaggtcaaagaggttacggacaacaatggagtcaagaccatcgccaataaccttaccagcacggtccaggtcttcacggactcagactatcagctcccgtacgtgctcgggtcggctcacgagggctgcctcccgccgttcccagcggacgttttcatgattcctcagtacgggtatctgacgcttaatgatggaagccaggccgtgggtcgttcgtccttttactgcctggaatatttcccgtcgcaaatgctaagaacgggtaacaacttccagttcagctacgagtttgagaacgtacctttccatagcagctacgctcacagccaaagcctggaccgactaatgaatccactcatcgaccaatacttgtactatctctcaaagactattaacggttctggatttggccaacaaacgctaaaattcagtgtggccggacccagcaacatggctgtccagggaagaaactacatacctggacccagctaccgacaacaacgtgtctcaaccactgtgctgcaaaacagcaacagcgaatttgcttggccttacgcttcttcttgggctctcaatggacgtaatagcttgatgaatcctggacctgctatggccagccacaaagaaggagaggaccgtttctttcctttgtctggatctttaatttttggcaaacaaggaactggaagagacaacgtggatgcggacaaagtcatgataaccaacgaagaagaaattaaaactactaacccggtagcaacggagtcctatggacaagtggccacaaaccaccagagtgcccgggcacaggcgcagaccggctgggttcaaaaccaaggaatacttccgggtatggtttggcaggacagagatgtgtacctgcaaggacccatttgggccaaaattcctcacacggacggcaactttcacccttctccgctgatgggagggtttggaatgaagcacccgcctcctcagatcctcatcaaaaacacacctgtacctgcggatcctccaacgcacttcaacaagggcaagctgaactctttcatcacccagtattctactggccaagtcagcgtggagatcgagtgggagctgcagaaggaaaacagcaagcgctggaacccggagatccagtacacttccaactattggaagtctaataatgttgaatttgctgttaatactgaaggtgtatatagtgaaccccgccccattggcaccagatacctgactcgtaatctg

SEQ ID NO: 550 - protein, 736 aa, synthetic construct
  REGION 1..736: note = Adeno Associated Virus Capsid Protein Variant
MAADGYLPDWLEDNLSEGIREWWALKPGAPQPKANQQHQDNARGLVLPGYKYLGPGNGLDKGEPVNAADAAALEHDKAYDQQLKAGDNPYLKYNHADAEFQERLKEDTSFGGNLGRAVFQAKKRLLEPLGLVEEAAKTAPGKKRPVEQSPQEPDSSAGIGKSGAQPAKKRLNFGQTGDTESVPDPQPIGEPPAAPSGVGSLTMASGGGAPVADNNEGADGVGSSSGNWHCDSQWLGDRVITTSTRTWALPTYNNHLYKQISNSTSGGSSNDNAYFGYSTPWGYFDFNRFHCHFSPRDWQRLINNNWGFRPKRLNFKLFNIQVKEVTDNNGVKTIANNLTSTVQVFTDSDYQLPYVLGSAHEGCLPPFPADVFMIPQYGYLTLNDGSQAVGRSSFYCLEYFPSQMLRTGNNFQFSYEFENVPFHSSYAHSQSLDRLMNPLIDQYLYYLSKTINGSGFGQQTLKFSVAGPSNMAVQGRNYIPGPSYRQQRVSTTVLQNSNSEFAWPYASSWALNGRNSLMNPGPAMASHKEGEDRFFPLSGSLIFGKQGTGRDNVDADKVMITNEEEIKTTNPVATESYGQVATNHQSARAQAQTGWVQNQGILPGMVWQDRDVYLQGPIWAKIPHTDGNFHPSPLMGGFGMKHPPPQILIKNTPVPADPPTHFNKGKLNSFITQYSTGQVSVEIEWELQKENSKRWNPEIQYTSNYWKSNNVEFAVNTEGVYSEPRPIGTRYLTRNL

SEQ ID NO: 551 - DNA, 2208 bp, synthetic construct
  misc_feature 1..2208: note = Adeno Associated Virus Capsid Protein Variant
  source 1..2208: mol_type = other DNA
atggctgccgatggttatcttccagattggctcgaggacaaccttagtgaaggaattcgcgagtggtgggctttgaaacctggagcccctcaacccaaggcaaatcaacaacatcaagacaacgctcgaggtcttgtgcttccgggttacaaataccttggacccggcaacggactcgacaagggggagccggtcaacgcagcagacgcggcggccctcgagcacgacaaggcctacgaccagcagctcaaggccggagacaacccgtacctcaagtacaaccacgccgacgccgagttccaggagcggctcaaagaagatacgtcttttgggggcaacctcgggcgagcagtcttccaggccaaaaagaggcttcttgaacctcttggtctggttgaggaagcggctaagacggctcctggaaagaagaggcctgtagagcagtctcctcaggaaccggactcctccgcgggtattggcaaatcgggtgcacagcccgctaaaaagagactcaatttcggtcagactggcgacacagagtcagtcccagaccctcaaccaatcggagaacctcccgcagccccctcaggtgtgggatctcttacaatggcttcaggtggtggcgcaccagtggcagacaataacgaaggtgccgatggagtgggtagttcctcgggaaattggcattgcgattcccaatggctgggggacagagtcatcaccaccagcacccgaacctgggccctgcccacctacaacaatcacctctacaagcaaatctccaacagcacatctggaggatcttcaaatgacaacgcctacttcggctacagcaccccctgggggtattttgacttcaacagattccactgccacttctcaccacgtgactggcagcgactcatcaacaacaactggggattccggcctaagcgactcaacttcaagctcttcaacattcaggtcaaagaggttacggacaacaatggagtcaagaccatcgccaataaccttaccagcacggtccaggtcttcacggactcagactatcagctcccgtacgtgctcgggtcggctcacgagggctgcctcccgccgttcccagcggacgttttcatgattcctcagtacgggtatctgacgcttaatgatggaagccaggccgtgggtcgttcgtccttttactgcctggaatatttcccgtcgcaaatgctaagaacgggtaacaacttccagttcagctacgagtttgagaacgtacctttccatagcagctacgctcacagccaaagcctggaccgactaatgaatccactcatcgaccaatacttgtactatctctcaaagactattaacggttctggacagggccaacaaacgctaaaattcagtgtggccggacccagcaacatggctgtccagggaagaaactacatacctggacccagctaccgacaacaacgtgtctcaaccactgtgacttttaacaacaacagcgaatttgcttggcctggagcttcttcttgggctctcaatggacgtaatagcttgatgaatcctggacctgctatggccagccacaaagaaggagaggaccgtttctttcctttgtctggatctttaatttttggcaaacaaggaactggaagagacaacgtggatgcggacaaagtcatgataaccaacgaagaagaaattaaaactactaacccggtagcaacggagtcctatggacaagtggccacaaaccaccagagtgcccgggcacaggcgcagaccggctgggttcaaaaccaaggaatacttccgggtatggtttggcaggacagagatgtgtacctgcaaggacccatttgggccaaaattcctcacacggacggcaactttcacccttctccgctgatgggagggtttggaatgaagcacccgcctcctcagatcctcatcaaaaacacacctgtacctgcggatcctccaacggccttcaacaagggcaagctgaactctttcatcacccagtattctactggccaagtcagcgtggagatcgagtgggagctgcagaaggaaaacagcaagcgctggaacccggagatccagtacacttccaactattacaagtctaataatgttgaatttgctgttaatactgaaggtgtatatagtgaaccccgccccattggcaccagatacctgactcgtaatctg

SEQ ID NO: 552 - protein, 736 aa, synthetic construct
  REGION 1..736: note = Adeno Associated Virus Capsid Protein Variant
MAADGYLPDWLEDNLSEGIREWWALKPGAPQPKANQQHQDNARGLVLPGYKYLGPGNGLDKGEPVNAADAAALEHDKAYDQQLKAGDNPYLKYNHADAEFQERLKEDTSFGGNLGRAVFQAKKRLLEPLGLVEEAAKTAPGKKRPVEQSPQEPDSSAGIGKSGAQPAKKRLNFGQTGDTESVPDPQPIGEPPAAPSGVGSLTMASGGGAPVADNNEGADGVGSSSGNWHCDSQWLGDRVITTSTRTWALPTYNNHLYKQISNSTSGGSSNDNAYFGYSTPWGYFDFNRFHCHFSPRDWQRLINNNWGFRPKRLNFKLFNIQVKEVTDNNGVKTIANNLTSTVQVFTDSDYQLPYVLGSAHEGCLPPFPADVFMIPQYGYLTLNDGSQAVGRSSFYCLEYFPSQMLRTGNNFQFSYEFENVPFHSSYAHSQSLDRLMNPLIDQYLYYLSKTINGSGQGQQTLKFSVAGPSNMAVQGRNYIPGPSYRQQRVSTTVTFNNNSEFAWPGASSWALNGRNSLMNPGPAMASHKEGEDRFFPLSGSLIFGKQGTGRDNVDADKVMITNEEEIKTTNPVATESYGQVATNHQSARAQAQTGWVQNQGILPGMVWQDRDVYLQGPIWAKIPHTDGNFHPSPLMGGFGMKHPPPQILIKNTPVPADPPTAFNKGKLNSFITQYSTGQVSVEIEWELQKENSKRWNPEIQYTSNYYKSNNVEFAVNTEGVYSEPRPIGTRYLTRNL

SEQ ID NO: 553 - DNA, 2208 bp, synthetic construct
  misc_feature 1..2208: note = Adeno Associated Virus Capsid Protein Variant
  source 1..2208: mol_type = other DNA
atggctgccgatggttatcttccagattggctcgaggacaaccttagtgaaggaattcgcgagtggtgggctttgaaacctggagcccctcaacccaaggcaaatcaacaacatcaagacaacgctcgaggtcttgtgcttccgggttacaaataccttggacccggcaacggactcgacaagggggagccggtcaacgcagcagacgcggcggccctcgagcacgacaaggcctacgaccagcagctcaaggccggagacaacccgtacctcaagtacaaccacgccgacgccgagttccaggagcggctcaaagaagatacgtcttttgggggcaacctcgggcgagcagtcttccaggccaaaaagaggcttcttgaacctcttggtctggttgaggaagcggctaagacggctcctggaaagaagaggcctgtagagcagtctcctcaggaaccggactcctccgcgggtattggcaaatcgggtgcacagcccgctaaaaagagactcaatttcggtcagactggcgacacagagtcagtcccagaccctcaaccaatcggagaacctcccgcagccccctcaggtgtgggatctcttacaatggcttcaggtggtggcgcaccagtggcagacaataacgaaggtgccgatggagtgggtagttcctcgggaaattggcattgcgattcccaatggctgggggacagagtcatcaccaccagcacccgaacctgggccctgcccacctacaacaatcacctctacaagcaaatctccaacagcacatctggaggatcttcaaatgacaacgcctacttcggctacagcaccccctgggggtattttgacttcaacagattccactgccacttctcaccacgtgactggcagcgactcatcaacaacaactggggattccggcctaagcgactcaacttcaagctcttcaacattcaggtcaaagaggttacggacaacaatggagtcaagaccatcgccaataaccttaccagcacggtccaggtcttcacggactcagactatcagctcccgtacgtgctcgggtcggctcacgagggctgcctcccgccgttcccagcggacgttttcatgattcctcagtacgggtatctgacgcttaatgatggaagccaggccgtgggtcgttcgtccttttactgcctggaatatttcccgtcgcaaatgctaagaacgggtaacaacttccagttcagctacgagtttgagaacgtacctttccatagcagctacgctcacagccaaagcctggaccgactaatgaatccactcatcgaccaatacttgtactatctctcaaagactattaacggttctggacagaatcaacaaacgctaaaattcagtgtggccggacccagcaacatggctgtccagggaagaaactacatacctggacccagctaccgacaacaacgtgtctcaaccactgtgactcaaaacaacaacagcgaatttgcttggccttacgcttcttcttgggctctcaatggacgtaatagcttgatgaatcctggacctgctatggccagccacaaagaaggagaggaccgtttctttcctttgtctggatctttaatttttggcaaacaaggaactggaagagacaacgtggatgcggacaaagtcatgataaccaacgaagaagaaattaaaactactaacccggtagcaacggagtcctatggacaagtggccacaaaccaccagagtgcccgggcacaggcgcagaccggctgggttcaaaaccaaggaatacttccgggtatggtttggcaggacagagatgtgtacctgcaaggacccatttgggccaaaattcctcacacggacggcaactttcacccttctccgctgatgggagggtttggaatgaagcacccgcctcctcagatcctcatcaaaaacacacctgtacctgcggatcctccaacggccttcaacaagggcaagctgaactctttcatcacccagtattctactggccaagtcagcgtggagatcgagtgggagctgcagaaggaaaacagcaagcgctggaacccggagatccagtacacttccaactattacaagtctaataatgttgaatttgctgttaatactgaaggtgtatatagtgaaccccgccccattggcaccagatacctgactcgtaatctg

SEQ ID NO: 554 - protein, 736 aa, synthetic construct
  REGION 1..736: note = Adeno Associated Virus Capsid Protein Variant
MAADGYLPDWLEDNLSEGIREWWALKPGAPQPKANQQHQDNARGLVLPGYKYLGPGNGLDKGEPVNAADAAALEHDKAYDQQLKAGDNPYLKYNHADAEFQERLKEDTSFGGNLGRAVFQAKKRLLEPLGLVEEAAKTAPGKKRPVEQSPQEPDSSAGIGKSGAQPAKKRLNFGQTGDTESVPDPQPIGEPPAAPSGVGSLTMASGGGAPVADNNEGADGVGSSSGNWHCDSQWLGDRVITTSTRTWALPTYNNHLYKQISNSTSGGSSNDNAYFGYSTPWGYFDFNRFHCHFSPRDWQRLINNNWGFRPKRLNFKLFNIQVKEVTDNNGVKTIANNLTSTVQVFTDSDYQLPYVLGSAHEGCLPPFPADVFMIPQYGYLTLNDGSQAVGRSSFYCLEYFPSQMLRTGNNFQFSYEFENVPFHSSYAHSQSLDRLMNPLIDQYLYYLSKTINGSGQNQQTLKFSVAGPSNMAVQGRNYIPGPSYRQQRVSTTVTQNNNSEFAWPYASSWALNGRNSLMNPGPAMASHKEGEDRFFPLSGSLIFGKQGTGRDNVDADKVMITNEEEIKTTNPVATESYGQVATNHQSARAQAQTGWVQNQGILPGMVWQDRDVYLQGPIWAKIPHTDGNFHPSPLMGGFGMKHPPPQILIKNTPVPADPPTAFNKGKLNSFITQYSTGQVSVEIEWELQKENSKRWNPEIQYTSNYYKSNNVEFAVNTEGVYSEPRPIGTRYLTRNL

SEQ ID NO: 555 - DNA, 2208 bp, synthetic construct
  misc_feature 1..2208: note = Adeno Associated Virus Capsid Protein Variant
  source 1..2208: mol_type = other DNA
atggctgccgatggttatcttccagattggctcgaggacaaccttagtgaaggaattcgcgagtggtgggctttgaaacctggagcccctcaacccaaggcaaatcaacaacatcaagacaacgctcgaggtcttgtgcttccgggttacaaataccttggacccggcaacggactcgacaagggggagccggtcaacgcagcagacgcggcggccctcgagcacgacaaggcctacgaccagcagctcaaggccggagacaacccgtacctcaagtacaaccacgccgacgccgagttccaggagcggctcaaagaagatacgtcttttgggggcaacctcgggcgagcagtcttccaggccaaaaagaggcttcttgaacctcttggtctggttgaggaagcggctaagacggctcctggaaagaagaggcctgtagagcagtctcctcaggaaccggactcctccgcgggtattggcaaatcgggtgcacagcccgctaaaaagagactcaatttcggtcagactggcgacacagagtcagtcccagaccctcaaccaatcggagaacctcccgcagccccctcaggtgtgggatctcttacaatggcttcaggtggtggcgcaccagtggcagacaataacgaaggtgccgatggagtgggtagttcctcgggaaattggcattgcgattcccaatggctgggggacagagtcatcaccaccagcacccgaacctgggccctgcccacctacaacaatcacctctacaagcaaatctccaacagcacatctggaggatcttcaaatgacaacgcctacttcggctacagcaccccctgggggtattttgacttcaacagattccactgccacttctcaccacgtgactggcagcgactcatcaacaacaactggggattccggcctaagcgactcaacttcaagctcttcaacattcaggtcaaagaggttacggacaacaatggagtcaagaccatcgccaataaccttaccagcacggtccaggtcttcacggactcagactatcagctcccgtacgtgctcgggtcggctcacgagggctgcctcccgccgttcccagcggacgttttcatgattcctcagtacgggtatctgacgcttaatgatggaagccaggccgtgggtcgttcgtccttttactgcctggaatatttcccgtcgcaaatgctaagaacgggtaacaacttccagttcagctacgagtttgagaacgtacctttccatagcagctacgctcacagccaaagcctggaccgactaatgaatccactcatcgaccaatacttgtactatctctcaaagactattaacggttctggatttaatcaacaaacgctaaaattcagtgtggccggacccagcaacatggctgtccagggaagaaactacatacctggacccagctaccgacaacaacgtgtctcaaccactgtgacttttaacaacaacagcgaatttgcttggccttacgcttcttcttgggctctcaatggacgtaatagcttgatgaatcctggacctgctatggccagccacaaagaaggagaggaccgtttctttcctttgtctggatctttaatttttggcaaacaaggaactggaagagacaacgtggatgcggacaaagtcatgataaccaacgaagaagaaattaaaactactaacccggtagcaacggagtcctatggacaagtggccacaaaccaccagagtgcccgggcacaggcgcagaccggctgggttcaaaaccaaggaatacttccgggtatggtttggcaggacagagatgtgtacctgcaaggacccatttgggccaaaattcctcacacggacggcaactttcacccttctccgctgatgggagggtttggaatgaagcacccgcctcctcagatcctcatcaaaaacacacctgtacctgcggatcctccaacggccttcaacaagggcaagctgaactctttcatcacccagtattctactggccaagtcagcgtggagatcgagtgggagctgcagaaggaaaacagcaagcgctggaacccggagatccagtacacttccaactattacaagtctaataatgttgaatttgctgttaatactgaaggtgtatatagtgaaccccgccccattggcaccagatacctgactcgtaatctg

SEQ ID NO: 556 - protein, 736 aa, synthetic construct
  REGION 1..736: note = Adeno Associated Virus Capsid Protein Variant
MAADGYLPDWLEDNLSEGIREWWALKPGAPQPKANQQHQDNARGLVLPGYKYLGPGNGLDKGEPVNAADAAALEHDKAYDQQLKAGDNPYLKYNHADAEFQERLKEDTSFGGNLGRAVFQAKKRLLEPLGLVEEAAKTAPGKKRPVEQSPQEPDSSAGIGKSGAQPAKKRLNFGQTGDTESVPDPQPIGEPPAAPSGVGSLTMASGGGAPVADNNEGADGVGSSSGNWHCDSQWLGDRVITTSTRTWALPTYNNHLYKQISNSTSGGSSNDNAYFGYSTPWGYFDFNRFHCHFSPRDWQRLINNNWGFRPKRLNFKLFNIQVKEVTDNNGVKTIANNLTSTVQVFTDSDYQLPYVLGSAHEGCLPPFPADVFMIPQYGYLTLNDGSQAVGRSSFYCLEYFPSQMLRTGNNFQFSYEFENVPFHSSYAHSQSLDRLMNPLIDQYLYYLSKTINGSGFNQQTLKFSVAGPSNMAVQGRNYIPGPSYRQQRVSTTVTFNNNSEFAWPYASSWALNGRNSLMNPGPAMASHKEGEDRFFPLSGSLIFGKQGTGRDNVDADKVMITNEEEIKTTNPVATESYGQVATNHQSARAQAQTGWVQNQGILPGMVWQDRDVYLQGPIWAKIPHTDGNFHPSPLMGGFGMKHPPPQILIKNTPVPADPPTAFNKGKLNSFITQYSTGQVSVEIEWELQKENSKRWNPEIQYTSNYYKSNNVEFAVNTEGVYSEPRPIGTRYLTRNL

SEQ ID NO: 557 - DNA, 2208 bp, synthetic construct
  misc_feature 1..2208: note = Adeno Associated Virus Capsid Protein Variant
  source 1..2208: mol_type = other DNA
atggctgccgatggttatcttccagattggctcgaggacaaccttagtgaaggaattcgcgagtggtgggctttgaaacctggagcccctcaacccaaggcaaatcaacaacatcaagacaacgctcgaggtcttgtgcttccgggttacaaataccttggacccggcaacggactcgacaagggggagccggtcaacgcagcagacgcggcggccctcgagcacgacaaggcctacgaccagcagctcaaggccggagacaacccgtacctcaagtacaaccacgccgacgccgagttccaggagcggctcaaagaagatacgtcttttgggggcaacctcgggcgagcagtcttccaggccaaaaagaggcttcttgaacctcttggtctggttgaggaagcggctaagacggctcctggaaagaagaggcctgtagagcagtctcctcaggaaccggactcctccgcgggtattggcaaatcgggtgcacagcccgctaaaaagagactcaatttcggtcagactggcgacacagagtcagtcccagaccctcaaccaatcggagaacctcccgcagccccctcaggtgtgggatctcttacaatggcttcaggtggtggcgcaccagtggcagacaataacgaaggtgccgatggagtgggtagttcctcgggaaattggcattgcgattcccaatggctgggggacagagtcatcaccaccagcacccgaacctgggccctgcccacctacaacaatcacctctacaagcaaatctccaacagcacatctggaggatcttcaaatgacaacgcctacttcggctacagcaccccctgggggtattttgacttcaacagattccactgccacttctcaccacgtgactggcagcgactcatcaacaacaactggggattccggcctaagcgactcaacttcaagctcttcaacattcaggtcaaagaggttacggacaacaatggagtcaagaccatcgccaataaccttaccagcacggtccaggtcttcacggactcagactatcagctcccgtacgtgctcgggtcggctcacgagggctgcctcccgccgttcccagcggacgttttcatgattcctcagtacgggtatctgacgcttaatgatggaagccaggccgtgggtcgttcgtccttttactgcctggaatatttcccgtcgcaaatgctaagaacgggtaacaacttccagttcagctacgagtttgagaacgtacctttccatagcagctacgctcacagccaaagcctggaccgactaatgaatccactcatcgaccaatacttgtactatctctcaaagactattaacggttctggacagggccaacaaacgctaaaattcagtgtggccggacccagcaacatggctgtccagggaagaaactacatacctggacccagctaccgacaacaacgtgtctcaaccactgtgactcaaaacagcaacagcgaatttgcttggcctggagcttcttcttgggctctcaatggacgtaatagcttgatgaatcctggacctgctatggccagccacaaagaaggagaggaccgtttctttcctttgtctggatctttaatttttggcaaacaaggaactatgagagacattgtggatgcggacaaagtcatgataaccaacgaagaagaaattaaaactactaacccggtagcaacggagtcctatggacaagtggccacaaaccaccagagtgcccgggcacaggcgcagaccggctgggttcaaaaccaaggaatacttccgggtatggtttggcaggacagagatgtgtacctgcaaggacccatttgggccaaaattcctcacacggacggcaactttcacccttctccgctgatgggagggtttggaatgaagcacccgcctcctcagatcctcatcaaaaacacacctgtacctgcggatcctccaacggccttcaacggcggcaagctgaactctttcatcacccagtattctactggccaagtcagcgtggagatcgagtgggagctgcagaaggaaaacagcaagcgctggaacccggagatccagtacacttccaactattacaagtctaataatgttgaatttgctgttaatactgaaggtgtatatagtgaaccccgccccattggcaccagatacctgactcgtaatctg

SEQ ID NO: 558 - protein, 736 aa, synthetic construct
  REGION 1..736: note = Adeno Associated Virus Capsid Protein Variant
MAADGYLPDWLEDNLSEGIREWWALKPGAPQPKANQQHQDNARGLVLPGYKYLGPGNGLDKGEPVNAADAAALEHDKAYDQQLKAGDNPYLKYNHADAEFQERLKEDTSFGGNLGRAVFQAKKRLLEPLGLVEEAAKTAPGKKRPVEQSPQEPDSSAGIGKSGAQPAKKRLNFGQTGDTESVPDPQPIGEPPAAPSGVGSLTMASGGGAPVADNNEGADGVGSSSGNWHCDSQWLGDRVITTSTRTWALPTYNNHLYKQISNSTSGGSSNDNAYFGYSTPWGYFDFNRFHCHFSPRDWQRLINNNWGFRPKRLNFKLFNIQVKEVTDNNGVKTIANNLTSTVQVFTDSDYQLPYVLGSAHEGCLPPFPADVFMIPQYGYLTLNDGSQAVGRSSFYCLEYFPSQMLRTGNNFQFSYEFENVPFHSSYAHSQSLDRLMNPLIDQYLYYLSKTINGSGQGQQTLKFSVAGPSNMAVQGRNYIPGPSYRQQRVSTTVTQNSNSEFAWPGASSWALNGRNSLMNPGPAMASHKEGEDRFFPLSGSLIFGKQGTMRDIVDADKVMITNEEEIKTTNPVATESYGQVATNHQSARAQAQTGWVQNQGILPGMVWQDRDVYLQGPIWAKIPHTDGNFHPSPLMGGFGMKHPPPQILIKNTPVPADPPTAFNGGKLNSFITQYSTGQVSVEIEWELQKENSKRWNPEIQYTSNYYKSNNVEFAVNTEGVYSEPRPIGTRYLTRNL

SEQ ID NO: 559 - DNA, 2208 bp, synthetic construct
  misc_feature 1..2208: note = Adeno Associated Virus Capsid Protein Variant
  source 1..2208: mol_type = other DNA
atggctgccgatggttatcttccagattggctcgaggacaaccttagtgaaggaattcgcgagtggtgggctttgaaacctggagcccctcaacccaaggcaaatcaacaacatcaagacaacgctcgaggtcttgtgcttccgggttacaaataccttggacccggcaacggactcgacaagggggagccggtcaacgcagcagacgcggcggccctcgagcacgacaaggcctacgaccagcagctcaaggccggagacaacccgtacctcaagtacaaccacgccgacgccgagttccaggagcggctcaaagaagatacgtcttttgggggcaacctcgggcgagcagtcttccaggccaaaaagaggcttcttgaacctcttggtctggttgaggaagcggctaagacggctcctggaaagaagaggcctgtagagcagtctcctcaggaaccggactcctccgcgggtattggcaaatcgggtgcacagcccgctaaaaagagactcaatttcggtcagactggcgacacagagtcagtcccagaccctcaaccaatcggagaacctcccgcagccccctcaggtgtgggatctcttacaatggcttcaggtggtggcgcaccagtggcagacaataacgaaggtgccgatggagtgggtagttcctcgggaaattggcattgcgattcccaatggctgggggacagagtcatcaccaccagcacccgaacctgggccctgcccacctacaacaatcacctctacaagcaaatctccaacagcacatctggaggatcttcaaatgacaacgcctacttcggctacagcaccccctgggggtattttgacttcaacagattccactgccacttctcaccacgtgactggcagcgactcatcaacaacaactggggattccggcctaagcgactcaacttcaagctcttcaacattcaggtcaaagaggttacggacaacaatggagtcaagaccatcgccaataaccttaccagcacggtccaggtcttcacggactcagactatcagctcccgtacgtgctcgggtcggctcacgagggctgcctcccgccgttcccagcggacgttttcatgattcctcagtacgggtatctgacgcttaatgatggaagccaggccgtgggtcgttcgtccttttactgcctggaatatttcccgtcgcaaatgctaagaacgggtaacaacttccagttcagctacgagtttgagaacgtacctttccatagcagctacgctcacagccaaagcctggaccgactaatgaatccactcatcgaccaatacttgtactatctctcaaagactattaacggttctggacagaatcaacaaacgctaaaattcagtgtggccggacccagcaacatggctgtccagggaagaaactacatacctggacccagctaccgacaacaacgtgtctcaaccactgtgctgcaaaacaacaacagcgaatttgcttggccttacgcttcttcttgggctctcaatggacgtaatagcttgatgaatcctggacctgctatggccagccacaaagaaggagaggaccgtttctttcctttgtctggatctttaatttttggcaaacaaggaactggaagagacaacgtggatgcggacaaagtcatgataaccaacgaagaagaaattaaaactactaacccggtagcaacggagtcctatggacaagtggccacaaaccaccagagtgcccgggcacaggcggcgaccggctgggttcaaaaccaaggaatacttccgggtatggtttggcaggacagagatgtgtacctgcaaggacccatttgggccaaaattcctcacacggacggcaactttcacccttctccgctgatgggagggtttggaatgaagcacccgcctcctcagatcctcatcaaaaacacacctgtacctgcggatcctccaacggccttcaacaagggcaagctgaactctttcatcacccagtattctactggccaagtcagcgtggagatcgagtgggagctgcagaaggaaaacagcaagcgctggaacccggagatccagtacacttccaactattacaagtctaataatgttgaatttgctgttaatactgaaggtgtatatagtgaaccccgccccattggcaccagatacctgactcgtaatctg

SEQ ID NO: 560 - protein, 736 aa, synthetic construct
  REGION 1..736: note = Adeno Associated Virus Capsid Protein Variant
MAADGYLPDWLEDNLSEGIREWWALKPGAPQPKANQQHQDNARGLVLPGYKYLGPGNGLDKGEPVNAADAAALEHDKAYDQQLKAGDNPYLKYNHADAEFQERLKEDTSFGGNLGRAVFQAKKRLLEPLGLVEEAAKTAPGKKRPVEQSPQEPDSSAGIGKSGAQPAKKRLNFGQTGDTESVPDPQPIGEPPAAPSGVGSLTMASGGGAPVADNNEGADGVGSSSGNWHCDSQWLGDRVITTSTRTWALPTYNNHLYKQISNSTSGGSSNDNAYFGYSTPWGYFDFNRFHCHFSPRDWQRLINNNWGFRPKRLNFKLFNIQVKEVTDNNGVKTIANNLTSTVQVFTDSDYQLPYVLGSAHEGCLPPFPADVFMIPQYGYLTLNDGSQAVGRSSFYCLEYFPSQMLRTGNNFQFSYEFENVPFHSSYAHSQSLDRLMNPLIDQYLYYLSKTINGSGQNQQTLKFSVAGPSNMAVQGRNYIPGPSYRQQRVSTTVLQNNNSEFAWPYASSWALNGRNSLMNPGPAMASHKEGEDRFFPLSGSLIFGKQGTGRDNVDADKVMITNEEEIKTTNPVATESYGQVATNHQSARAQAATGWVQNQGILPGMVWQDRDVYLQGPIWAKIPHTDGNFHPSPLMGGFGMKHPPPQILIKNTPVPADPPTAFNKGKLNSFITQYSTGQVSVEIEWELQKENSKRWNPEIQYTSNYYKSNNVEFAVNTEGVYSEPRPIGTRYLTRNL

SEQ ID NO: 561 - DNA, 2208 bp, synthetic construct
  misc_feature 1..2208: note = Adeno Associated Virus Capsid Protein Variant
  source 1..2208: mol_type = other DNA
atggctgccgatggttatcttccagattggctcgaggacaaccttagtgaaggaattcgcgagtggtgggctttgaaacctggagcccctcaacccaaggcaaatcaacaacatcaagacaacgctcgaggtcttgtgcttccgggttacaaataccttggacccggcaacggactcgacaagggggagccggtcaacgcagcagacgcggcggccctcgagcacgacaaggcctacgaccagcagctcaaggccggagacaacccgtacctcaagtacaaccacgccgacgccgagttccaggagcggctcaaagaagatacgtcttttgggggcaacctcgggcgagcagtcttccaggccaaaaagaggcttcttgaacctcttggtctggttgaggaagcggctaagacggctcctggaaagaagaggcctgtagagcagtctcctcaggaaccggactcctccgcgggtattggcaaatcgggtgcacagcccgctaaaaagagactcaatttcggtcagactggcgacacagagtcagtcccagaccctcaaccaatcggagaacctcccgcagccccctcaggtgtgggatctcttacaatggcttcaggtggtggcgcaccagtggcagacaataacgaaggtgccgatggagtgggtagttcctcgggaaattggcattgcgattcccaatggctgggggacagagtcatcaccaccagcacccgaacctgggccctgcccacctacaacaatcacctctacaagcaaatctccaacagcacatctggaggatcttcaaatgacaacgcctacttcggctacagcaccccctgggggtattttgacttcaacagattccactgccacttctcaccacgtgactggcagcgactcatcaacaacaactggggattccggcctaagcgactcaacttcaagctcttcaacattcaggtcaaagaggttacggacaacaatggagtcaagaccatcgccaataaccttaccagcacggtccaggtcttcacggactcagactatcagctcccgtacgtgctcgggtcggctcacgagggctgcctcccgccgttcccagcggacgttttcatgattcctcagtacgggtatctgacgcttaatgatggaagccaggccgtgggtcgttcgtccttttactgcctggaatatttcccgtcgcaaatgctaagaacgggtaacaacttccagttcagctacgagtttgagaacgtacctttccatagcagctacgctcacagccaaagcctggaccgactaatgaatccactcatcgaccaatacttgtactatctctcaaagactattaacggttctggatttggccaacaaacgctaaaattcagtgtggccggacccagcaacatggctgtccagggaagaaactacatacctggacccagctaccgacaacaacgtgtctcaaccactgtgactcaaaacaacaacagcgaatttgcttggcctggagcttcttcttgggctctcaatggacgtaatagcttgatgaatcctggacctgctatggccagccacaaagaaggagaggaccgtttctttcctttgtctggatctttaatttttggcaaacaaggaactggaagagacaacgtggatgcggacaaagtcatgataaccaacgaagaagaaattaaaactactaacccggtagcaacggagtcctatggacaagtggccacaaaccaccagagtgcccgggcacaggcgcagaccggctgggttcaaaaccaaggaatacttccgggtatggtttggcaggacagagatgtgtacctgcaaggacccatttgggccaaaattcctcacacggacggcaactttcacccttctccgctgatgggagggtttggaatgaagcacccgcctcctcagatcctcatcaaaaacacacctgtacctgcggatcctccaacggccttcaacaagggcaagctgaactctttcatcacccagtattctactggccaagtcagcgtggagatcgagtgggagctgcagaaggaaaacagcaagcgctggaacccggagatccagtacacttccaactattacaagtctaataatgttgaatttgctgttaatactgaaggtgtatatagtgaaccccgccccattggcaccagatacctgactcgtaatctg

SEQ ID NO: 562 - protein, 736 aa, synthetic construct
  REGION 1..736: note = Adeno Associated Virus Capsid Protein Variant
MAADGYLPDWLEDNLSEGIREWWALKPGAPQPKANQQHQDNARGLVLPGYKYLGPGNGLDKGEPVNAADAAALEHDKAYDQQLKAGDNPYLKYNHADAEFQERLKEDTSFGGNLGRAVFQAKKRLLEPLGLVEEAAKTAPGKKRPVEQSPQEPDSSAGIGKSGAQPAKKRLNFGQTGDTESVPDPQPIGEPPAAPSGVGSLTMASGGGAPVADNNEGADGVGSSSGNWHCDSQWLGDRVITTSTRTWALPTYNNHLYKQISNSTSGGSSNDNAYFGYSTPWGYFDFNRFHCHFSPRDWQRLINNNWGFRPKRLNFKLFNIQVKEVTDNNGVKTIANNLTSTVQVFTDSDYQLPYVLGSAHEGCLPPFPADVFMIPQYGYLTLNDGSQAVGRSSFYCLEYFPSQMLRTGNNFQFSYEFENVPFHSSYAHSQSLDRLMNPLIDQYLYYLSKTINGSGFGQQTLKFSVAGPSNMAVQGRNYIPGPSYRQQRVSTTVTQNNNSEFAWPGASSWALNGRNSLMNPGPAMASHKEGEDRFFPLSGSLIFGKQGTGRDNVDADKVMITNEEEIKTTNPVATESYGQVATNHQSARAQAQTGWVQNQGILPGMVWQDRDVYLQGPIWAKIPHTDGNFHPSPLMGGFGMKHPPPQILIKNTPVPADPPTAFNKGKLNSFITQYSTGQVSVEIEWELQKENSKRWNPEIQYTSNYYKSNNVEFAVNTEGVYSEPRPIGTRYLTRNL

SEQ ID NO: 563 - DNA, 2208 bp, synthetic construct
  misc_feature 1..2208: note = Adeno Associated Virus Capsid Protein Variant
  source 1..2208: mol_type = other DNA
atggctgccgatggttatcttccagattggctcgaggacaaccttagtgaaggaattcgcgagtggtgggctttgaaacctggagcccctcaacccaaggcaaatcaacaacatcaagacaacgctcgaggtcttgtgcttccgggttacaaataccttggacccggcaacggactcgacaagggggagccggtcaacgcagcagacgcggcggccctcgagcacgacaaggcctacgaccagcagctcaaggccggagacaacccgtacctcaagtacaaccacgccgacgccgagttccaggagcggctcaaagaagatacgtcttttgggggcaacctcgggcgagcagtcttccaggccaaaaagaggcttcttgaacctcttggtctggttgaggaagcggctaagacggctcctggaaagaagaggcctgtagagcagtctcctcaggaaccggactcctccgcgggtattggcaaatcgggtgcacagcccgctaaaaagagactcaatttcggtcagactggcgacacagagtcagtcccagaccctcaaccaatcggagaacctcccgcagccccctcaggtgtgggatctcttacaatggcttcaggtggtggcgcaccagtggcagacaataacgaaggtgccgatggagtgggtagttcctcgggaaattggcattgcgattcccaatggctgggggacagagtcatcaccaccagcacccgaacctgggccctgcccacctacaacaatcacctctacaagcaaatctccaacagcacatctggaggatcttcaaatgacaacgcctacttcggctacagcaccccctgggggtattttgacttcaacagattccactgccacttctcaccacgtgactggcagcgactcatcaacaacaactggggattccggcctaagcgactcaacttcaagctcttcaacattcaggtcaaagaggttacggacaacaatggagtcaagaccatcgccaataaccttaccagcacggtccaggtcttcacggactcagactatcagctcccgtacgtgctcgggtcggctcacgagggctgcctcccgccgttcccagcggacgttttcatgattcctcagtacgggtatctgacgcttaatgatggaagccaggccgtgggtcgttcgtccttttactgcctggaatatttcccgtcgcaaatgctaagaacgggtaacaacttccagttcagctacgagtttgagaacgtacctttccatagcagctacgctcacagccaaagcctggaccgactaatgaatccactcatcgaccaatacttgtactatctctcaaagactattaacggttctggacagaatcaacaaacgctaaaattcagtgtggccggacccagcaacatggctgtccagggaagaaactacatacctggacccagctaccgacaacaacgtgtctcaaccactgtgactcaaaacaacaacagcgaatttgcttggcctggagcttcttcttgggctctcaatggacgtaatagcttgatgaatcctggacctgctatggccagccacaaagaaggagaggaccgtttctttcctttgtctggatctttaatttttggcaaacaaggagtaggaagagacattgtggatgcggacaaagtcatgataaccaacgaagaagaaattaaaactactaacccggtagcaacggagtcctatggacaagtggccacaaaccaccagagtgcccgggcacaggcggcgaccggctgggttcaaaaccaaggaatacttccgggtatggtttggcaggacagagatgtgtacctgcaaggacccatttgggccaaaattcctcacacggacggcaactttcacccttctccgctgatgggagggtttggaatgaagcacccgcctcctcagatcctcatcaaaaacacacctgtacctgcggatcctccaacgcacttcaacaagggcaagctgaactctttcatcacccagtattctactggccaagtcagcgtggagatcgagtgggagctgcagaaggaaaacagcaagcgctggaacccggagatccagtacacttccaactattggaagtctaataatgttgaatttgctgttaatactgaaggtgtatatagtgaaccccgccccattggcaccagatacctgactcgtaatctg

SEQ ID NO: 564 - protein, 736 aa, synthetic construct
  REGION 1..736: note = Adeno Associated Virus Capsid Protein Variant
MAADGYLPDWLEDNLSEGIREWWALKPGAPQPKANQQHQDNARGLVLPGYKYLGPGNGLDKGEPVNAADAAALEHDKAYDQQLKAGDNPYLKYNHADAEFQERLKEDTSFGGNLGRAVFQAKKRLLEPLGLVEEAAKTAPGKKRPVEQSPQEPDSSAGIGKSGAQPAKKRLNFGQTGDTESVPDPQPIGEPPAAPSGVGSLTMASGGGAPVADNNEGADGVGSSSGNWHCDSQWLGDRVITTSTRTWALPTYNNHLYKQISNSTSGGSSNDNAYFGYSTPWGYFDFNRFHCHFSPRDWQRLINNNWGFRPKRLNFKLFNIQVKEVTDNNGVKTIANNLTSTVQVFTDSDYQLPYVLGSAHEGCLPPFPADVFMIPQYGYLTLNDGSQAVGRSSFYCLEYFPSQMLRTGNNFQFSYEFENVPFHSSYAHSQSLDRLMNPLIDQYLYYLSKTINGSGQNQQTLKFSVAGPSNMAVQGRNYIPGPSYRQQRVSTTVTQNNNSEFAWPGASSWALNGRNSLMNPGPAMASHKEGEDRFFPLSGSLIFGKQGVGRDIVDADKVMITNEEEIKTTNPVATESYGQVATNHQSARAQAATGWVQNQGILPGMVWQDRDVYLQGPIWAKIPHTDGNFHPSPLMGGFGMKHPPPQILIKNTPVPADPPTHFNKGKLNSFITQYSTGQVSVEIEWELQKENSKRWNPEIQYTSNYWKSNNVEFAVNTEGVYSEPRPIGTRYLTRNL

SEQ ID NO: 565 - DNA, 2208 bp, synthetic construct
  misc_feature 1..2208: note = Adeno Associated Virus Capsid Protein Variant
  source 1..2208: mol_type = other DNA
atggctgccgatggttatcttccagattggctcgaggacaaccttagtgaaggaattcgcgagtggtgggctttgaaacctggagcccctcaacccaaggcaaatcaacaacatcaagacaacgctcgaggtcttgtgcttccgggttacaaataccttggacccggcaacggactcgacaagggggagccggtcaacgcagcagacgcggcggccctcgagcacgacaaggcctacgaccagcagctcaaggccggagacaacccgtacctcaagtacaaccacgccgacgccgagttccaggagcggctcaaagaagatacgtcttttgggggcaacctcgggcgagcagtcttccaggccaaaaagaggcttcttgaacctcttggtctggttgaggaagcggctaagacggctcctggaaagaagaggcctgtagagcagtctcctcaggaaccggactcctccgcgggtattggcaaatcgggtgcacagcccgctaaaaagagactcaatttcggtcagactggcgacacagagtcagtcccagaccctcaaccaatcggagaacctcccgcagccccctcaggtgtgggatctcttacaatggcttcaggtggtggcgcaccagtggcagacaataacgaaggtgccgatggagtgggtagttcctcgggaaattggcattgcgattcccaatggctgggggacagagtcatcaccaccagcacccgaacctgggccctgcccacctacaacaatcacctctacaagcaaatctccaacagcacatctggaggatcttcaaatgacaacgcctacttcggctacagcaccccctgggggtattttgacttcaacagattccactgccacttctcaccacgtgactggcagcgactcatcaacaacaactggggattccggcctaagcgactcaacttcaagctcttcaacattcaggtcaaagaggttacggacaacaatggagtcaagaccatcgccaataaccttaccagcacggtccaggtcttcacggactcagactatcagctcccgtacgtgctcgggtcggctcacgagggctgcctcccgccgttcccagcggacgttttcatgattcctcagtacgggtatctgacgcttaatgatggaagccaggccgtgggtcgttcgtccttttactgcctggaatatttcccgtcgcaaatgctaagaacgggtaacaacttccagttcagctacgagtttgagaacgtacctttccatagcagctacgctcacagccaaagcctggaccgactaatgaatccactcatcgaccaatacttgtactatctctcaaagactattaacggttctggatttggccaacaaacgctaaaattcagtgtggccggacccagcaacatggctgtccagggaagaaactacatacctggacccagctaccgacaacaacgtgtctcaaccactgtgctgcaaaacagcaacagcgaatttgcttggccttacgcttcttcttgggctctcaatggacgtaatagcttgatgaatcctggacctgctatggccagccacaaagaaggagaggaccgtttctttcctttgtctggatctttaatttttggcaaacaaggaactggaagagacaacgtggatgcggacaaagtcatgataaccaacgaagaagaaattaaaactactaacccggtagcaacggagtcctatggacaagtggccacaaaccaccagagtgcccgggcacaggcgcagaccggctgggttcaaaaccaaggaatacttccgggtatggtttggcaggacagagatgtgtacctgcaaggacccatttgggccaaaattcctcacacggacggcaactttcacccttctccgctgatgggagggtttggaatgaagcacccgcctcctcagatcctcatcaaaaacacacctgtacctgcggatcctccaacgcacttcaacaagggcaagctgaactctttcatcacccagtattctactggccaagtcagcgtggagatcgagtgggagctgcagaaggaaaacagcaagcgctggaacccggagatccagtacacttccaactattacaagtctaataatgttgaatttgctgttaatactgaaggtgtatatagtgaaccccgccccattggcaccagatacctgactcgtaatctg

SEQ ID NO: 566 - protein, 736 aa, synthetic construct
  REGION 1..736: note = Adeno Associated Virus Capsid Protein Variant
MAADGYLPDWLEDNLSEGIREWWALKPGAPQPKANQQHQDNARGLVLPGYKYLGPGNGLDKGEPVNAADAAALEHDKAYDQQLKAGDNPYLKYNHADAEFQERLKEDTSFGGNLGRAVFQAKKRLLEPLGLVEEAAKTAPGKKRPVEQSPQEPDSSAGIGKSGAQPAKKRLNFGQTGDTESVPDPQPIGEPPAAPSGVGSLTMASGGGAPVADNNEGADGVGSSSGNWHCDSQWLGDRVITTSTRTWALPTYNNHLYKQISNSTSGGSSNDNAYFGYSTPWGYFDFNRFHCHFSPRDWQRLINNNWGFRPKRLNFKLFNIQVKEVTDNNGVKTIANNLTSTVQVFTDSDYQLPYVLGSAHEGCLPPFPADVFMIPQYGYLTLNDGSQAVGRSSFYCLEYFPSQMLRTGNNFQFSYEFENVPFHSSYAHSQSLDRLMNPLIDQYLYYLSKTINGSGFGQQTLKFSVAGPSNMAVQGRNYIPGPSYRQQRVSTTVLQNSNSEFAWPYASSWALNGRNSLMNPGPAMASHKEGEDRFFPLSGSLIFGKQGTGRDNVDADKVMITNEEEIKTTNPVATESYGQVATNHQSARAQAQTGWVQNQGILPGMVWQDRDVYLQGPIWAKIPHTDGNFHPSPLMGGFGMKHPPPQILIKNTPVPADPPTHFNKGKLNSFITQYSTGQVSVEIEWELQKENSKRWNPEIQYTSNYYKSNNVEFAVNTEGVYSEPRPIGTRYLTRNL

SEQ ID NO: 567 - DNA, 2208 bp, synthetic construct
  misc_feature 1..2208: note = Adeno Associated Virus Capsid Protein Variant
  source 1..2208: mol_type = other DNA
atggctgccgatggttatcttccagattggctcgaggacaaccttagtgaaggaattcgcgagtggtgggctttgaaacctggagcccctcaacccaaggcaaatcaacaacatcaagacaacgctcgaggtcttgtgcttccgggttacaaataccttggacccggcaacggactcgacaagggggagccggtcaacgcagcagacgcggcggccctcgagcacgacaaggcctacgaccagcagctcaaggccggagacaacccgtacctcaagtacaaccacgccgacgccgagttccaggagcggctcaaagaagatacgtcttttgggggcaacctcgggcgagcagtcttccaggccaaaaagaggcttcttgaacctcttggtctggttgaggaagcggctaagacggctcctggaaagaagaggcctgtagagcagtctcctcaggaaccggactcctccgcgggtattggcaaatcgggtgcacagcccgctaaaaagagactcaatttcggtcagactggcgacacagagtcagtcccagaccctcaaccaatcggagaacctcccgcagccccctcaggtgtgggatctcttacaatggcttcaggtggtggcgcaccagtggcagacaataacgaaggtgccgatggagtgggtagttcctcgggaaattggcattgcgattcccaatggctgggggacagagtcatcaccaccagcacccgaacctgggccctgcccacctacaacaatcacctctacaagcaaatctccaacagcacatctggaggatcttcaaatgacaacgcctacttcggctacagcaccccctgggggtattttgacttcaacagattccactgccacttctcaccacgtgactggcagcgactcatcaacaacaactggggattccggcctaagcgactcaacttcaagctcttcaacattcaggtcaaagaggttacggacaacaatggagtcaagaccatcgccaataaccttaccagcacggtccaggtcttcacggactcagactatcagctcccgtacgtgctcgggtcggctcacgagggctgcctcccgccgttcccagcggacgttttcatgattcctcagtacgggtatctgacgcttaatgatggaagccaggccgtgggtcgttcgtccttttactgcctggaatatttcccgtcgcaaatgctaagaacgggtaacaacttccagttcagctacgagtttgagaacgtacctttccatagcagctacgctcacagccaaagcctggaccgactaatgaatccactcatcgaccaatacttgtactatctctcaaagactattaacggttctggacagaatcaacaaacgctaaaattcagtgtggccggacccagcaacatggctgtccagggaagaaactacatacctggacccagctaccgacaacaacgtgtctcaaccactgtgctgcaaaacaacaacagcgaatttgcttggcctggagcttcttcttgggctctcaatggacgtaatagcttgatgaatcctggacctgctatggccagccacaaagaaggagaggaccgtttctttcctttgtctggatctttaatttttggcaaacaaggaactggaagagacaacgtggatgcggacaaagtcatgataaccaacgaagaagaaattaaaactactaacccggtagcaacggagtcctatggacaagtggccacaaaccaccagagtgcccgggcacaggcgcagaccggctgggttcaaaaccaaggaatacttccgggtatggtttggcaggacagagatgtgtacctgcaaggacccatttgggccaaaattcctcacacggacggcaactttcacccttctccgctgatgggagggtttggaatgaagcacccgcctcctcagatcctcatcaaaaacacacctgtacctgcggatcctccaacggccttcaacaagggcaagctgaactctttcatcacccagtattctactggccaagtcagcgtggagatcgagtgggagctgcagaaggaaaacagcaagcgctggaacccggagatccagtacacttccaactattacaagtctaataatgttgaatttgctgttaatactgaaggtgtatatagtgaaccccgccccattggcaccagatacctgactcgtaatctg

SEQ ID NO: 568 - protein, 736 aa, synthetic construct
  REGION 1..736: note = Adeno Associated Virus Capsid Protein Variant
MAADGYLPDWLEDNLSEGIREWWALKPGAPQPKANQQHQDNARGLVLPGYKYLGPGNGLDKGEPVNAADAAALEHDKAYDQQLKAGDNPYLKYNHADAEFQERLKEDTSFGGNLGRAVFQAKKRLLEPLGLVEEAAKTAPGKKRPVEQSPQEPDSSAGIGKSGAQPAKKRLNFGQTGDTESVPDPQPIGEPPAAPSGVGSLTMASGGGAPVADNNEGADGVGSSSGNWHCDSQWLGDRVITTSTRTWALPTYNNHLYKQISNSTSGGSSNDNAYFGYSTPWGYFDFNRFHCHFSPRDWQRLINNNWGFRPKRLNFKLFNIQVKEVTDNNGVKTIANNLTSTVQVFTDSDYQLPYVLGSAHEGCLPPFPADVFMIPQYGYLTLNDGSQAVGRSSFYCLEYFPSQMLRTGNNFQFSYEFENVPFHSSYAHSQSLDRLMNPLIDQYLYYLSKTINGSGQNQQTLKFSVAGPSNMAVQGRNYIPGPSYRQQRVSTTVLQNNNSEFAWPGASSWALNGRNSLMNPGPAMASHKEGEDRFFPLSGSLIFGKQGTGRDNVDADKVMITNEEEIKTTNPVATESYGQVATNHQSARAQAQTGWVQNQGILPGMVWQDRDVYLQGPIWAKIPHTDGNFHPSPLMGGFGMKHPPPQILIKNTPVPADPPTAFNKGKLNSFITQYSTGQVSVEIEWELQKENSKRWNPEIQYTSNYYKSNNVEFAVNTEGVYSEPRPIGTRYLTRNL

SEQ ID NO: 569 - DNA, 2208 bp, synthetic construct
  misc_feature 1..2208: note = Adeno Associated Virus Capsid Protein Variant
  source 1..2208: mol_type = other DNA
atggctgccgatggttatcttccagattggctcgaggacaaccttagtgaaggaattcgcgagtggtgggctttgaaacctggagcccctcaacccaaggcaaatcaacaacatcaagacaacgctcgaggtcttgtgcttccgggttacaaataccttggacccggcaacggactcgacaagggggagccggtcaacgcagcagacgcggcggccctcgagcacgacaaggcctacgaccagcagctcaaggccggagacaacccgtacctcaagtacaaccacgccgacgccgagttccaggagcggctcaaagaagatacgtcttttgggggcaacctcgggcgagcagtcttccaggccaaaaagaggcttcttgaacctcttggtctggttgaggaagcggctaagacggctcctggaaagaagaggcctgtagagcagtctcctcaggaaccggactcctccgcgggtattggcaaatcgggtgcacagcccgctaaaaagagactcaatttcggtcagactggcgacacagagtcagtcccagaccctcaaccaatcggagaacctcccgcagccccctcaggtgtgggatctcttacaatggcttcaggtggtggcgcaccagtggcagacaataacgaaggtgccgatggagtgggtagttcctcgggaaattggcattgcgattcccaatggctgggggacagagtcatcaccaccagcacccgaacctgggccctgcccacctacaacaatcacctctacaagcaaatctccaacagcacatctggaggatcttcaaatgacaacgcctacttcggctacagcaccccctgggggtattttgacttcaacagattccactgccacttctcaccacgtgactggcagcgactcatcaacaacaactggggattccggcctaagcgactcaacttcaagctcttcaacattcaggtcaaagaggttacggacaacaatggagtcaagaccatcgccaataaccttaccagcacggtccaggtcttcacggactcagactatcagctcccgtacgtgctcgggtcggctcacgagggctgcctcccgccgttcccagcggacgttttcatgattcctcagtacgggtatctgacgcttaatgatggaagccaggccgtgggtcgttcgtccttttactgcctggaatatttcccgtcgcaaatgctaagaacgggtaacaacttccagttcagctacgagtttgagaacgtacctttccatagcagctacgctcacagccaaagcctggaccgactaatgaatccactcatcgaccaatacttgtactatctctcaaagactattaacggttctggacagaatcaacaaacgctaaaattcagtgtggccggacccagcaacatggctgtccagggaagaaactacatacctggacccagctaccgacaacaacgtgtctcaaccactgtgctgtttaacaacaacagcgaatttgcttggccttacgcttcttcttgggctctcaatggacgtaatagcttgatgaatcctggacctgctatggccagccacaaagaaggagaggaccgtttctttcctttgtctggatctttaatttttggcaaacaaggaactggaagagacaacgtggatgcggacaaagtcatgataaccaacgaagaagaaattaaaactactaacccggtagcaacggagtcctatggacaagtggccacaaaccaccagagtgcccgggcacaggcgcagaccggctgggttcaaaaccaaggaatacttccgggtatggtttggcaggacagagatgtgtacctgcaaggacccatttgggccaaaattcctcacacggacggcaactttcacccttctccgctgatgggagggtttggaatgaagcacccgcctcctcagatcctcatcaaaaacacacctgtacctgcggatcctccaacggccttcaacggcggcaagctgaactctttcatcacccagtattctactggccaagtcagcgtggagatcgagtgggagctgcagaaggaaaacagcaagcgctggaacccggagatccagtacacttccaactattacaagtctaataatgttgaatttgctgttaatactgaaggtgtatatagtgaaccccgccccattggcaccagatacctgactcgtaatctg

SEQ ID NO: 570 - protein, 736 aa, synthetic construct
  REGION 1..736: note = Adeno Associated Virus Capsid Protein Variant
MAADGYLPDWLEDNLSEGIREWWALKPGAPQPKANQQHQDNARGLVLPGYKYLGPGNGLDKGEPVNAADAAALEHDKAYDQQLKAGDNPYLKYNHADAEFQERLKEDTSFGGNLGRAVFQAKKRLLEPLGLVEEAAKTAPGKKRPVEQSPQEPDSSAGIGKSGAQPAKKRLNFGQTGDTESVPDPQPIGEPPAAPSGVGSLTMASGGGAPVADNNEGADGVGSSSGNWHCDSQWLGDRVITTSTRTWALPTYNNHLYKQISNSTSGGSSNDNAYFGYSTPWGYFDFNRFHCHFSPRDWQRLINNNWGFRPKRLNFKLFNIQVKEVTDNNGVKTIANNLTSTVQVFTDSDYQLPYVLGSAHEGCLPPFPADVFMIPQYGYLTLNDGSQAVGRSSFYCLEYFPSQMLRTGNNFQFSYEFENVPFHSSYAHSQSLDRLMNPLIDQYLYYLSKTINGSGQNQQTLKFSVAGPSNMAVQGRNYIPGPSYRQQRVSTTVLFNNNSEFAWPYASSWALNGRNSLMNPGPAMASHKEGEDRFFPLSGSLIFGKQGTGRDNVDADKVMITNEEEIKTTNPVATESYGQVATNHQSARAQAQTGWVQNQGILPGMVWQDRDVYLQGPIWAKIPHTDGNFHPSPLMGGFGMKHPPPQILIKNTPVPADPPTAFNGGKLNSFITQYSTGQVSVEIEWELQKENSKRWNPEIQYTSNYYKSNNVEFAVNTEGVYSEPRPIGTRYLTRNL

SEQ ID NO: 571 - DNA, 2208 bp, synthetic construct
  misc_feature 1..2208: note = Adeno Associated Virus Capsid Protein Variant
  source 1..2208: mol_type = other DNA
atggctgccgatggttatcttccagattggctcgaggacaaccttagtgaaggaattcgcgagtggtgggctttgaaacctggagcccctcaacccaaggcaaatcaacaacatcaagacaacgctcgaggtcttgtgcttccgggttacaaataccttggacccggcaacggactcgacaagggggagccggtcaacgcagcagacgcggcggccctcgagcacgacaaggcctacgaccagcagctcaaggccggagacaacccgtacctcaagtacaaccacgccgacgccgagttccaggagcggctcaaagaagatacgtcttttgggggcaacctcgggcgagcagtcttccaggccaaaaagaggcttcttgaacctcttggtctggttgaggaagcggctaagacggctcctggaaagaagaggcctgtagagcagtctcctcaggaaccggactcctccgcgggtattggcaaatcgggtgcacagcccgctaaaaagagactcaatttcggtcagactggcgacacagagtcagtcccagaccctcaaccaatcggagaacctcccgcagccccctcaggtgtgggatctcttacaatggcttcaggtggtggcgcaccagtggcagacaataacgaaggtgccgatggagtgggtagttcctcgggaaattggcattgcgattcccaatggctgggggacagagtcatcaccaccagcacccgaacctgggccctgcccacctacaacaatcacctctacaagcaaatctccaacagcacatctggaggatcttcaaatgacaacgcctacttcggctacagcaccccctgggggtattttgacttcaacagattccactgccacttctcaccacgtgactggcagcgactcatcaacaacaactggggattccggcctaagcgactcaacttcaagctcttcaacattcaggtcaaagaggttacggacaacaatggagtcaagaccatcgccaataaccttaccagcacggtccaggtcttcacggactcagactatcagctcccgtacgtgctcgggtcggctcacgagggctgcctcccgccgttcccagcggacgttttcatgattcctcagtacgggtatctgacgcttaatgatggaagccaggccgtgggtcgttcgtccttttactgcctggaatatttcccgtcgcaaatgctaagaacgggtaacaacttccagttcagctacgagtttgagaacgtacctttccatagcagctacgctcacagccaaagcctggaccgactaatgaatccactcatcgaccaatacttgtactatctctcaaagactattaacggttctggacagaatcaacaaacgctaaaattcagtgtggccggacccagcaacatggctgtccagggaagaaactacatacctggacccagctaccgacaacaacgtgtctcaaccactgtgactcaaaacaacaacagcgaatttgcttggccttacgcttcttcttgggctctcaatggacgtaatagcttgatgaatcctggacctgctatggccagccacaaagaaggagaggaccgtttctttcctttgtctggatctttaatttttggcaaacaaggaactggaagagacaacgtggatgcggacaaagtcatgataaccaacgaagaagaaattaaaactactaacccggtagcaacggagtcctatggacaagtggccacaaaccaccagagtgcccgggcacaggcgcagaccggctgggttcaaaaccaaggaatacttccgggtatggtttggcaggacagagatgtgtacctgcaaggacccatttgggccaaaattcctcacacggacggcaactttcacccttctccgctgatgggagggtttggaatgaagcacccgcctcctcagatcctcatcaaaaacacacctgtacctgcggatcctccaacggccttcaacggcggcaagctgaactctttcatcacccagtattctactggccaagtcagcgtggagatcgagtgggagctgcagaaggaaaacagcaagcgctggaacccggagatccagtacacttccaactattacaagtctaataatgttgaatttgctgttaatactgaaggtgtatatagtgaaccccgccccattggcaccagatacctgactcgtaatctg

SEQ ID NO: 572 - protein, 736 aa, synthetic construct
  REGION 1..736: note = Adeno Associated Virus Capsid Protein Variant
MAADGYLPDWLEDNLSEGIREWWALKPGAPQPKANQQHQDNARGLVLPGYKYLGPGNGLDKGEPVNAADAAALEHDKAYDQQLKAGDNPYLKYNHADAEFQERLKEDTSFGGNLGRAVFQAKKRLLEPLGLVEEAAKTAPGKKRPVEQSPQEPDSSAGIGKSGAQPAKKRLNFGQTGDTESVPDPQPIGEPPAAPSGVGSLTMASGGGAPVADNNEGADGVGSSSGNWHCDSQWLGDRVITTSTRTWALPTYNNHLYKQISNSTSGGSSNDNAYFGYSTPWGYFDFNRFHCHFSPRDWQRLINNNWGFRPKRLNFKLFNIQVKEVTDNNGVKTIANNLTSTVQVFTDSDYQLPYVLGSAHEGCLPPFPADVFMIPQYGYLTLNDGSQAVGRSSFYCLEYFPSQMLRTGNNFQFSYEFENVPFHSSYAHSQSLDRLMNPLIDQYLYYLSKTINGSGQNQQTLKFSVAGPSNMAVQGRNYIPGPSYRQQRVSTTVTQNNNSEFAWPYASSWALNGRNSLMNPGPAMASHKEGEDRFFPLSGSLIFGKQGTGRDNVDADKVMITNEEEIKTTNPVATESYGQVATNHQSARAQAQTGWVQNQGILPGMVWQDRDVYLQGPIWAKIPHTDGNFHPSPLMGGFGMKHPPPQILIKNTPVPADPPTAFNGGKLNSFITQYSTGQVSVEIEWELQKENSKRWNPEIQYTSNYYKSNNVEFAVNTEGVYSEPRPIGTRYLTRNL

SEQ ID NO: 573 - DNA, 2208 bp, synthetic construct
  misc_feature 1..2208: note = Adeno Associated Virus Capsid Protein Variant
  source 1..2208: mol_type = other DNA
atggctgccgatggttatcttccagattggctcgaggacaaccttagtgaaggaattcgcgagtggtgggctttgaaacctggagcccctcaacccaaggcaaatcaacaacatcaagacaacgctcgaggtcttgtgcttccgggttacaaataccttggacccggcaacggactcgacaagggggagccggtcaacgcagcagacgcggcggccctcgagcacgacaaggcctacgaccagcagctcaaggccggagacaacccgtacctcaagtacaaccacgccgacgccgagttccaggagcggctcaaagaagatacgtcttttgggggcaacctcgggcgagcagtcttccaggccaaaaagaggcttcttgaacctcttggtctggttgaggaagcggctaagacggctcctggaaagaagaggcctgtagagcagtctcctcaggaaccggactcctccgcgggtattggcaaatcgggtgcacagcccgctaaaaagagactcaatttcggtcagactggcgacacagagtcagtcccagaccctcaaccaatcggagaacctcccgcagccccctcaggtgtgggatctcttacaatggcttcaggtggtggcgcaccagtggcagacaataacgaaggtgccgatggagtgggtagttcctcgggaaattggcattgcgattcccaatggctgggggacagagtcatcaccaccagcacccgaacctgggccctgcccacctacaacaatcacctctacaagcaaatctccaacagcacatctggaggatcttcaaatgacaacgcctacttcggctacagcaccccctgggggtattttgacttcaacagattccactgccacttctcaccacgtgactggcagcgactcatcaacaacaactggggattccggcctaagcgactcaacttcaagctcttcaacattcaggtcaaagaggttacggacaacaatggagtcaagaccatcgccaataaccttaccagcacggtccaggtcttcacggactcagactatcagctcccgtacgtgctcgggtcggctcacgagggctgcctcccgccgttcccagcggacgttttcatgattcctcagtacgggtatctgacgcttaatgatggaagccaggccgtgggtcgttcgtccttttactgcctggaatatttcccgtcgcaaatgctaagaacgggtaacaacttccagttcagctacgagtttgagaacgtacctttccatagcagctacgctcacagccaaagcctggaccgactaatgaatccactcatcgaccaatacttgtactatctctcaaagactattaacggttctggatttaatcaacaaacgctaaaattcagtgtggccggacccagcaacatggctgtccagggaagaaactacatacctggacccagctaccgacaacaacgtgtctcaaccactgtgctgcaaaacagcaacagcgaatttgcttggcctggagcttcttcttgggctctcaatggacgtaatagcttgatgaatcctggacctgctatggccagccacaaagaaggagaggaccgtttctttcctttgtctggatctttaatttttggcaaacaaggaactggaagagacaacgtggatgcggacaaagtcatgataaccaacgaagaagaaattaaaactactaacccggtagcaacggagtcctatggacaagtggccacaaaccaccagagtgcccgggcacaggcgcagaccggctgggttcaaaaccaaggaatacttccgggtatggtttggcaggacagagatgtgtacctgcaaggacccatttgggccaaaattcctcacacggacggcaactttcacccttctccgctgatgggagggtttggaatgaagcacccgcctcctcagatcctcatcaaaaacacacctgtacctgcggatcctccaacgcacttcaacaagggcaagctgaactctttcatcacccagtattctactggccaagtcagcgtggagatcgagtgggagctgcagaaggaaaacagcaagcgctggaacccggagatccagtacacttccaactattacaagtctaataatgttgaatttgctgttaatactgaaggtgtatatagtgaaccccgccccattggcaccagatacctgactcgtaatctg

SEQ ID NO: 574 - protein, 736 aa, synthetic construct
  REGION 1..736: note = Adeno Associated Virus Capsid Protein Variant
MAADGYLPDWLEDNLSEGIREWWALKPGAPQPKANQQHQDNARGLVLPGYKYLGPGNGLDKGEPVNAADAAALEHDKAYDQQLKAGDNPYLKYNHADAEFQERLKEDTSFGGNLGRAVFQAKKRLLEPLGLVEEAAKTAPGKKRPVEQSPQEPDSSAGIGKSGAQPAKKRLNFGQTGDTESVPDPQPIGEPPAAPSGVGSLTMASGGGAPVADNNEGADGVGSSSGNWHCDSQWLGDRVITTSTRTWALPTYNNHLYKQISNSTSGGSSNDNAYFGYSTPWGYFDFNRFHCHFSPRDWQRLINNNWGFRPKRLNFKLFNIQVKEVTDNNGVKTIANNLTSTVQVFTDSDYQLPYVLGSAHEGCLPPFPADVFMIPQYGYLTLNDGSQAVGRSSFYCLEYFPSQMLRTGNNFQFSYEFENVPFHSSYAHSQSLDRLMNPLIDQYLYYLSKTINGSGFNQQTLKFSVAGPSNMAVQGRNYIPGPSYRQQRVSTTVLQNSNSEFAWPGASSWALNGRNSLMNPGPAMASHKEGEDRFFPLSGSLIFGKQGTGRDNVDADKVMITNEEEIKTTNPVATESYGQVATNHQSARAQAQTGWVQNQGILPGMVWQDRDVYLQGPIWAKIPHTDGNFHPSPLMGGFGMKHPPPQILIKNTPVPADPPTHFNKGKLNSFITQYSTGQVSVEIEWELQKENSKRWNPEIQYTSNYYKSNNVEFAVNTEGVYSEPRPIGTRYLTRNL

SEQ ID NO: 575 - DNA, 2208 bp, synthetic construct
  misc_feature 1..2208: note = Adeno Associated Virus Capsid Protein Variant
  source 1..2208: mol_type = other DNA
atggctgccgatggttatcttccagattggctcgaggacaaccttagtgaaggaattcgcgagtggtgggctttgaaacctggagcccctcaacccaaggcaaatcaacaacatcaagacaacgctcgaggtcttgtgcttccgggttacaaataccttggacccggcaacggactcgacaagggggagccggtcaacgcagcagacgcggcggccctcgagcacgacaaggcctacgaccagcagctcaaggccggagacaacccgtacctcaagtacaaccacgccgacgccgagttccaggagcggctcaaagaagatacgtcttttgggggcaacctcgggcgagcagtcttccaggccaaaaagaggcttcttgaacctcttggtctggttgaggaagcggctaagacggctcctggaaagaagaggcctgtagagcagtctcctcaggaaccggactcctccgcgggtattggcaaatcgggtgcacagcccgctaaaaagagactcaatttcggtcagactggcgacacagagtcagtcccagaccctcaaccaatcggagaacctcccgcagccccctcaggtgtgggatctcttacaatggcttcaggtggtggcgcaccagtggcagacaataacgaaggtgccgatggagtgggtagttcctcgggaaattggcattgcgattcccaatggctgggggacagagtcatcaccaccagcacccgaacctgggccctgcccacctacaacaatcacctctacaagcaaatctccaacagcacatctggaggatcttcaaatgacaacgcctacttcggctacagcaccccctgggggtattttgacttcaacagattccactgccacttctcaccacgtgactggcagcgactcatcaacaacaactggggattccggcctaagcgactcaacttcaagctcttcaacattcaggtcaaagaggttacggacaacaatggagtcaagaccatcgccaataaccttaccagcacggtccaggtcttcacggactcagactatcagctcccgtacgtgctcgggtcggctcacgagggctgcctcccgccgttcccagcggacgttttcatgattcctcagtacgggtatctgacgcttaatgatggaagccaggccgtgggtcgttcgtccttttactgcctggaatatttcccgtcgcaaatgctaagaacgggtaacaacttccagttcagctacgagtttgagaacgtacctttccatagcagctacgctcacagccaaagcctggaccgactaatgaatccactcatcgaccaatacttgtactatctctcaaagactattaacggttctggacagaatcaacaaacgctaaaattcagtgtggccggacccagcaacatggctgtccagggaagaaactacatacctggacccagctaccgacaacaacgtgtctcaaccactacgactcaaaacaacaacagcgaatttgcttggcctggagcttcttcttgggctctcaatggacgtaatagcttgatgaatcctggacctgctatggccagccacaaagaaggagaggaccgtttctttcctttgtctggatctttaatttttggcaaacaaggaactggaagagacaacgtggatgcggacaaagtcatgataaccaacgaagaagaaattaaaactactaacccggtagcaacggagtcctatggacaagtggccacaaaccaccagagtgcccgggcacaggcgcagaccggctgggttcaaaaccaaggaatacttccgggtatggtttggcaggacagagatgtgtacctgcaaggacccatttgggccaaaattcctcacacggacggcaactttcacccttctccgctgatgggagggtttggactgaagcacccgcctcctcagatcctcatcaaaaacacacctgtacctgcggatcctccaacggccttcaacaagggcaagctgaactctttcatcacccagtattctactggccaagtcagcgtggagatcgagtgggagctgcagaaggaaaacagcaagcgctggaacccggagatccagtacacttccaactattacaagtctaataatgttgaatttgctgttaatactgaaggtgtatatagtgaaccccgccccattggcaccagatacctgactcgtaatctg

SEQ ID NO: 576 - protein, 736 aa, synthetic construct
  REGION 1..736: note = Adeno Associated Virus Capsid Protein Variant
MAADGYLPDWLEDNLSEGIREWWALKPGAPQPKANQQHQDNARGLVLPGYKYLGPGNGLDKGEPVNAADAAALEHDKAYDQQLKAGDNPYLKYNHADAEFQERLKEDTSFGGNLGRAVFQAKKRLLEPLGLVEEAAKTAPGKKRPVEQSPQEPDSSAGIGKSGAQPAKKRLNFGQTGDTESVPDPQPIGEPPAAPSGVGSLTMASGGGAPVADNNEGADGVGSSSGNWHCDSQWLGDRVITTSTRTWALPTYNNHLYKQISNSTSGGSSNDNAYFGYSTPWGYFDFNRFHCHFSPRDWQRLINNNWGFRPKRLNFKLFNIQVKEVTDNNGVKTIANNLTSTVQVFTDSDYQLPYVLGSAHEGCLPPFPADVFMIPQYGYLTLNDGSQAVGRSSFYCLEYFPSQMLRTGNNFQFSYEFENVPFHSSYAHSQSLDRLMNPLIDQYLYYLSKTINGSGQNQQTLKFSVAGPSNMAVQGRNYIPGPSYRQQRVSTTTTQNNNSEFAWPGASSWALNGRNSLMNPGPAMASHKEGEDRFFPLSGSLIFGKQGTGRDNVDADKVMITNEEEIKTTNPVATESYGQVATNHQSARAQAQTGWVQNQGILPGMVWQDRDVYLQGPIWAKIPHTDGNFHPSPLMGGFGLKHPPPQILIKNTPVPADPPTAFNKGKLNSFITQYSTGQVSVEIEWELQKENSKRWNPEIQYTSNYYKSNNVEFAVNTEGVYSEPRPIGTRYLTRNL

SEQ ID NO: 577 - DNA, 2208 bp, synthetic construct
  misc_feature 1..2208: note = Adeno Associated Virus Capsid Protein Variant
  source 1..2208: mol_type = other DNA
atggctgccgatggttatcttccagattggctcgaggacaaccttagtgaaggaattcgcgagtggtgggctttgaaacctggagcccctcaacccaaggcaaatcaacaacatcaagacaacgctcgaggtcttgtgcttccgggttacaaataccttggacccggcaacggactcgacaagggggagccggtcaacgcagcagacgcggcggccctcgagcacgacaaggcctacgaccagcagctcaaggccggagacaacccgtacctcaagtacaaccacgccgacgccgagttccaggagcggctcaaagaagatacgtcttttgggggcaacctcgggcgagcagtcttccaggccaaaaagaggcttcttgaacctcttggtctggttgaggaagcggctaagacggctcctggaaagaagaggcctgtagagcagtctcctcaggaaccggactcctccgcgggtattggcaaatcgggtgcacagcccgctaaaaagagactcaatttcggtcagactggcgacacagagtcagtcccagaccctcaaccaatcggagaacctcccgcagccccctcaggtgtgggatctcttacaatggcttcaggtggtggcgcaccagtggcagacaataacgaaggtgccgatggagtgggtagttcctcgggaaattggcattgcgattcccaatggctgggggacagagtcatcaccaccagcacccgaacctgggccctgcccacctacaacaatcacctctacaagcaaatctccaacagcacatctggaggatcttcaaatgacaacgcctacttcggctacagcaccccctgggggtattttgacttcaacagattccactgccacttctcaccacgtgactggcagcgactcatcaacaacaactggggattccggcctaagcgactcaacttcaagctcttcaacattcaggtcaaagaggttacggacaacaatggagtcaagaccatcgccaataaccttaccagcacggtccaggtcttcacggactcagactatcagctcccgtacgtgctcgggtcggctcacgagggctgcctcccgccgttcccagcggacgttttcatgattcctcagtacgggtatctgacgcttaatgatggaagccaggccgtgggtcgttcgtccttttactgcctggaatatttcccgtcgcaaatgctaagaacgggtaacaacttccagttcagctacgagtttgagaacgtacctttccatagcagctacgctcacagccaaagcctggaccgactaatgaatccactcatcgaccaatacttgtactatctctcaaagactattaacggttctggacagggccaacaaacgctaaaattcagtgtggccggacccagcaacatggctgtccagggaagaaactacatacctggacccagctaccgacaacaacgtgtctcaaccactgtgactcaaaacaacaacagcgaatttgcttggcctggagcttcttcttgggctctcaatggacgtaatagcttgatgaatcctggacctgctatggccagccacaaagaaggagaggaccgtttctttcctttgtctggatctttaatttttggcaaacaaggagtaggaagagacaacgtggattgggacaaagtcatgataaccaacgaagaagaaattaaaactactaacccggtagcaacggagtcctatggacaagtggccacaaaccaccagagtgcccgggcacaggcggcgaccggctgggttcaaaaccaaggaatacttccgggtatggtttggcaggacagagatgtgtacctgcaaggacccatttgggccaaaattcctcacacggacggcaactttcacccttctccgctgatgggagggtttggaatgaagcacccgcctcctcagatcctcatcaaaaacacacctgtacctgcggatcctccaacgcacttcaacaagggcaagctgaactctttcatcacccagtattctactggccaagtcagcgtggagatcgagtgggagctgcagaaggaaaacagcaagcgctggaacccggagatccagtacacttccaactattacaagtctaataatgttgaatttgctgttaatactgaaggtgtatatagtgaaccccgccccattggcaccagatacctgactcgtaatctg

SEQ ID NO: 578 - protein, 736 aa, synthetic construct
  REGION 1..736: note = Adeno Associated Virus Capsid Protein Variant
MAADGYLPDWLEDNLSEGIREWWALKPGAPQPKANQQHQDNARGLVLPGYKYLGPGNGLDKGEPVNAADAAALEHDKAYDQQLKAGDNPYLKYNHADAEFQERLKEDTSFGGNLGRAVFQAKKRLLEPLGLVEEAAKTAPGKKRPVEQSPQEPDSSAGIGKSGAQPAKKRLNFGQTGDTESVPDPQPIGEPPAAPSGVGSLTMASGGGAPVADNNEGADGVGSSSGNWHCDSQWLGDRVITTSTRTWALPTYNNHLYKQISNSTSGGSSNDNAYFGYSTPWGYFDFNRFHCHFSPRDWQRLINNNWGFRPKRLNFKLFNIQVKEVTDNNGVKTIANNLTSTVQVFTDSDYQLPYVLGSAHEGCLPPFPADVFMIPQYGYLTLNDGSQAVGRSSFYCLEYFPSQMLRTGNNFQFSYEFENVPFHSSYAHSQSLDRLMNPLIDQYLYYLSKTINGSGQGQQTLKFSVAGPSNMAVQGRNYIPGPSYRQQRVSTTVTQNNNSEFAWPGASSWALNGRNSLMNPGPAMASHKEGEDRFFPLSGSLIFGKQGVGRDNVDWDKVMITNEEEIKTTNPVATESYGQVATNHQSARAQAATGWVQNQGILPGMVWQDRDVYLQGPIWAKIPHTDGNFHPSPLMGGFGMKHPPPQILIKNTPVPADPPTHFNKGKLNSFITQYSTGQVSVEIEWELQKENSKRWNPEIQYTSNYYKSNNVEFAVNTEGVYSEPRPIGTRYLTRNL

SEQ ID NO: 579 - DNA, 2208 bp, synthetic construct
  misc_feature 1..2208: note = Adeno Associated Virus Capsid Protein Variant
  source 1..2208: mol_type = other DNA
atggctgccgatggttatcttccagattggctcgaggacaaccttagtgaaggaattcgcgagtggtgggctttgaaacctggagcccctcaacccaaggcaaatcaacaacatcaagacaacgctcgaggtcttgtgcttccgggttacaaataccttggacccggcaacggactcgacaagggggagccggtcaacgcagcagacgcggcggccctcgagcacgacaaggcctacgaccagcagctcaaggccggagacaacccgtacctcaagtacaaccacgccgacgccgagttccaggagcggctcaaagaagatacgtcttttgggggcaacctcgggcgagcagtcttccaggccaaaaagaggcttcttgaacctcttggtctggttgaggaagcggctaagacggctcctggaaagaagaggcctgtagagcagtctcctcaggaaccggactcctccgcgggtattggcaaatcgggtgcacagcccgctaaaaagagactcaatttcggtcagactggcgacacagagtcagtcccagaccctcaaccaatcggagaacctcccgcagccccctcaggtgtgggatctcttacaatggcttcaggtggtggcgcaccagtggcagacaataacgaaggtgccgatggagtgggtagttcctcgggaaattggcattgcgattcccaatggctgggggacagagtcatcaccaccagcacccgaacctgggccctgcccacctacaacaatcacctctacaagcaaatctccaacagcacatctggaggatcttcaaatgacaacgcctacttcggctacagcaccccctgggggtattttgacttcaacagattccactgccacttctcaccacgtgactggcagcgactcatcaacaacaactggggattccggcctaagcgactcaacttcaagctcttcaacattcaggtcaaagaggttacggacaacaatggagtcaagaccatcgccaataaccttaccagcacggtccaggtcttcacggactcagactatcagctcccgtacgtgctcgggtcggctcacgagggctgcctcccgccgttcccagcggacgttttcatgattcctcagtacgggtatctgacgcttaatgatggaagccaggccgtgggtcgttcgtccttttactgcctggaatatttcccgtcgcaaatgctaagaacgggtaacaacttccagttcagctacgagtttgagaacgtacctttccatagcagctacgctcacagccaaagcctggaccgactaatgaatccactcatcgaccaatacttgtactatctctcaaagactattaacggttctggacagaatcaacaaacgctaaaattcagtgtggccggacccagcaacatggctgtccagggaagaaactacatacctggacccagctaccgacaacaacgtgtctcaaccactgtgactcaaaacaacaacagcgaatttgcttggcctggagcttcttcttgggctctcaatggacgtaatagcttgatgaatcctggacctgctatggccagccacaaagaaggagaggaccgtttctttcctttgtctggatctttaatttttggcaaacaaggaactggaagagacaacgtggatgcggacaaagtcatgataaccaacgaagaagaaattaaaactactaacccggtagcaacggagtcctatggacaagtggccacaaaccaccagagtgcccgggcacaggcgcagaccggctgggttcaaaaccaaggaatacttccgggtatggtttggcaggacagagatgtgtacctgcaaggacccatttgggccaaaattcctcacacggacggcaactttcacccttctccgctgatgggagggtttggaatgaagcacccgcctcctcagatcctcatcaaaaacacacctgtacctgcggatcctccaacgcacttcaacggcggcaagctgaactctttcatcacccagtattctactggccaagtcagcgtggagatcgagtgggagctgcagaaggaaaacagcaagcgctggaacccggagatccagtacacttccaactattacaagtctaataatgttgaatttgctgttaatactgaaggtgtatatagtgaaccccgccccattggcaccagatacctgactcgtaatctg

SEQ ID NO: 580 - protein, 736 aa, synthetic construct
  REGION 1..736: note = Adeno Associated Virus Capsid Protein Variant
MAADGYLPDWLEDNLSEGIREWWALKPGAPQPKANQQHQDNARGLVLPGYKYLGPGNGLDKGEPVNAADAAALEHDKAYDQQLKAGDNPYLKYNHADAEFQERLKEDTSFGGNLGRAVFQAKKRLLEPLGLVEEAAKTAPGKKRPVEQSPQEPDSSAGIGKSGAQPAKKRLNFGQTGDTESVPDPQPIGEPPAAPSGVGSLTMASGGGAPVADNNEGADGVGSSSGNWHCDSQWLGDRVITTSTRTWALPTYNNHLYKQISNSTSGGSSNDNAYFGYSTPWGYFDFNRFHCHFSPRDWQRLINNNWGFRPKRLNFKLFNIQVKEVTDNNGVKTIANNLTSTVQVFTDSDYQLPYVLGSAHEGCLPPFPADVFMIPQYGYLTLNDGSQAVGRSSFYCLEYFPSQMLRTGNNFQFSYEFENVPFHSSYAHSQSLDRLMNPLIDQYLYYLSKTINGSGQNQQTLKFSVAGPSNMAVQGRNYIPGPSYRQQRVSTTVTQNNNSEFAWPGASSWALNGRNSLMNPGPAMASHKEGEDRFFPLSGSLIFGKQGTGRDNVDADKVMITNEEEIKTTNPVATESYGQVATNHQSARAQAQTGWVQNQGILPGMVWQDRDVYLQGPIWAKIPHTDGNFHPSPLMGGFGMKHPPPQILIKNTPVPADPPTHFNGGKLNSFITQYSTGQVSVEIEWELQKENSKRWNPEIQYTSNYYKSNNVEFAVNTEGVYSEPRPIGTRYLTRNL

SEQ ID NO: 581 - DNA, 2208 bp, synthetic construct
  misc_feature 1..2208: note = Adeno Associated Virus Capsid Protein Variant
  source 1..2208: mol_type = other DNA
atggctgccgatggttatcttccagattggctcgaggacaaccttagtgaaggaattcgcgagtggtgggctttgaaacctggagcccctcaacccaaggcaaatcaacaacatcaagacaacgctcgaggtcttgtgcttccgggttacaaataccttggacccggcaacggactcgacaagggggagccggtcaacgcagcagacgcggcggccctcgagcacgacaaggcctacgaccagcagctcaaggccggagacaacccgtacctcaagtacaaccacgccgacgccgagttccaggagcggctcaaagaagatacgtcttttgggggcaacctcgggcgagcagtcttccaggccaaaaagaggcttcttgaacctcttggtctggttgaggaagcggctaagacggctcctggaaagaagaggcctgtagagcagtctcctcaggaaccggactcctccgcgggtattggcaaatcgggtgcacagcccgctaaaaagagactcaatttcggtcagactggcgacacagagtcagtcccagaccctcaaccaatcggagaacctcccgcagccccctcaggtgtgggatctcttacaatggcttcaggtggtggcgcaccagtggcagacaataacgaaggtgccgatggagtgggtagttcctcgggaaattggcattgcgattcccaatggctgggggacagagtcatcaccaccagcacccgaacctgggccctgcccacctacaacaatcacctctacaagcaaatctccaacagcacatctggaggatcttcaaatgacaacgcctacttcggctacagcaccccctgggggtattttgacttcaacagattccactgccacttctcaccacgtgactggcagcgactcatcaacaacaactggggattccggcctaagcgactcaacttcaagctcttcaacattcaggtcaaagaggttacggacaacaatggagtcaagaccatcgccaataaccttaccagcacggtccaggtcttcacggactcagactatcagctcccgtacgtgctcgggtcggctcacgagggctgcctcccgccgttcccagcggacgttttcatgattcctcagtacgggtatctgacgcttaatgatggaagccaggccgtgggtcgttcgtccttttactgcctggaatatttcccgtcgcaaatgctaagaacgggtaacaacttccagttcagctacgagtttgagaacgtacctttccatagcagctacgctcacagccaaagcctggaccgactaatgaatccactcatcgaccaatacttgtactatctctcaaagactattaacggttctggacagggccaacaaacgctaaaattcagtgtggccggacccagcaacatggctgtccagggaagaaactacatacctggacccagctaccgacaacaacgtgtctcaaccactgtgactcaaaacaacaacagcgaatttgcttggcctggagcttcttcttgggctctcaatggacgtaatagcttgatgaatcctggacctgctatggccagccacaaagaaggagaggaccgtttctttcctttgtctggatctttaatttttggcaaacaaggaactggaagagacaacgtggatgcggacaaagtcatgataaccaacgaagaagaaattaaaactactaacccggtagcaacggagtcctatggacaagtggccacaaaccaccagagtgcccgggcacaggcggcgaccggctgggttcaaaaccaaggaatacttccgggtatggtttggcaggacagagatgtgtacctgcaaggacccatttgggccaaaattcctcacacggacggcaactttcacccttctccgctgatgggagggtttggaatgaagcacccgcctcctcagatcctcatcaaaaacacacctgtacctgcggatcctccaacgcacttcaacaagggcaagctgaactctttcatcacccagtattctactggccaagtcagcgtggagatcgagtgggagctgcagaaggaaaacagcaagcgctggaacccggagatccagtacacttccaactattacaagtctaataatgttgaatttgctgttaatactgaaggtgtatatagtgaaccccgccccattggcaccagatacctgactcgtaatctg

SEQ ID NO: 582 - protein, 736 aa, synthetic construct
  REGION 1..736: note = Adeno Associated Virus Capsid Protein Variant
MAADGYLPDWLEDNLSEGIREWWALKPGAPQPKANQQHQDNARGLVLPGYKYLGPGNGLDKGEPVNAADAAALEHDKAYDQQLKAGDNPYLKYNHADAEFQERLKEDTSFGGNLGRAVFQAKKRLLEPLGLVEEAAKTAPGKKRPVEQSPQEPDSSAGIGKSGAQPAKKRLNFGQTGDTESVPDPQPIGEPPAAPSGVGSLTMASGGGAPVADNNEGADGVGSSSGNWHCDSQWLGDRVITTSTRTWALPTYNNHLYKQISNSTSGGSSNDNAYFGYSTPWGYFDFNRFHCHFSPRDWQRLINNNWGFRPKRLNFKLFNIQVKEVTDNNGVKTIANNLTSTVQVFTDSDYQLPYVLGSAHEGCLPPFPADVFMIPQYGYLTLNDGSQAVGRSSFYCLEYFPSQMLRTGNNFQFSYEFENVPFHSSYAHSQSLDRLMNPLIDQYLYYLSKTINGSGQGQQTLKFSVAGPSNMAVQGRNYIPGPSYRQQRVSTTVTQNNNSEFAWPGASSWALNGRNSLMNPGPAMASHKEGEDRFFPLSGSLIFGKQGTGRDNVDADKVMITNEEEIKTTNPVATESYGQVATNHQSARAQAATGWVQNQGILPGMVWQDRDVYLQGPIWAKIPHTDGNFHPSPLMGGFGMKHPPPQILIKNTPVPADPPTHFNKGKLNSFITQYSTGQVSVEIEWELQKENSKRWNPEIQYTSNYYKSNNVEFAVNTEGVYSEPRPIGTRYLTRNL

SEQ ID NO: 583 - DNA, 2208 bp, synthetic construct
  misc_feature 1..2208: note = Adeno Associated Virus Capsid Protein Variant
  source 1..2208: mol_type = other DNA
atggctgccgatggttatcttccagattggctcgaggacaaccttagtgaaggaattcgcgagtggtgggctttgaaacctggagcccctcaacccaaggcaaatcaacaacatcaagacaacgctcgaggtcttgtgcttccgggttacaaataccttggacccggcaacggactcgacaagggggagccggtcaacgcagcagacgcggcggccctcgagcacgacaaggcctacgaccagcagctcaaggccggagacaacccgtacctcaagtacaaccacgccgacgccgagttccaggagcggctcaaagaagatacgtcttttgggggcaacctcgggcgagcagtcttccaggccaaaaagaggcttcttgaacctcttggtctggttgaggaagcggctaagacggctcctggaaagaagaggcctgtagagcagtctcctcaggaaccggactcctccgcgggtattggcaaatcgggtgcacagcccgctaaaaagagactcaatttcggtcagactggcgacacagagtcagtcccagaccctcaaccaatcggagaacctcccgcagccccctcaggtgtgggatctcttacaatggcttcaggtggtggcgcaccagtggcagacaataacgaaggtgccgatggagtgggtagttcctcgggaaattggcattgcgattcccaatggctgggggacagagtcatcaccaccagcacccgaacctgggccctgcccacctacaacaatcacctctacaagcaaatctccaacagcacatctggaggatcttcaaatgacaacgcctacttcggctacagcaccccctgggggtattttgacttcaacagattccactgccacttctcaccacgtgactggcagcgactcatcaacaacaactggggattccggcctaagcgactcaacttcaagctcttcaacattcaggtcaaagaggttacggacaacaatggagtcaagaccatcgccaataaccttaccagcacggtccaggtcttcacggactcagactatcagctcccgtacgtgctcgggtcggctcacgagggctgcctcccgccgttcccagcggacgttttcatgattcctcagtacgggtatctgacgcttaatgatggaagccaggccgtgggtcgttcgtccttttactgcctggaatatttcccgtcgcaaatgctaagaacgggtaacaacttccagttcagctacacgtttgagaacgtacctttccatagcagctacgctcacagccaaagcctggaccgactaatgaatccactcatcgaccaatacttgtactatctctcaaagactattaacggttctggacagaatcaacaaacgctaaaattcagtgtggccggacccagcaacatggctgtccagggaagaaactacatacctggacccagctaccgacaacaacgtgtctcaaccactgtgactcaaaacaacaacagcgaatttgcttggcctggagcttcttcttgggctctcaatggacgtaatagcttgatgaatcctggacctgctatggccagccacaaagaaggagaggaccgtttctttcctttgtctggatctttaatttttggcaaacaaggaactggaagagacaacgtggatgcggacaaagtcatgataaccaacgaagaagaaattaaaactactaacccggtagcaacggagtcctatggacaagtggccacaaaccaccagagtgcccgggcacaggcgcagaccggctgggttcaaaaccaaggaatacttccgggtatggtttggcaggacagagatgtgtacctgcaaggacccatttgggccaaaattcctcacacggacggcaactttcacccttctccgctgatgggagggtttggaatgaagcacccgcctcctcagatcctcatcaaaaacacacctgtacctgcggatcctccaacgtggttcaacaagggcaagctgaactctttcatcacccagtattctactggccaagtcagcgtggagatcgagtgggagctgcagaaggaaaacagcaagcgctggaacccggagatccagtacacttccaactattacaagtctaataatgttgaatttgctgttaatactgaaggtgtatatagtgaaccccgccccattggcaccagatacctgactcgtaatctg

SEQ ID NO: 584 - protein, 736 aa, synthetic construct
  REGION 1..736: note = Adeno Associated Virus Capsid Protein Variant
MAADGYLPDWLEDNLSEGIREWWALKPGAPQPKANQQHQDNARGLVLPGYKYLGPGNGLDKGEPVNAADAAALEHDKAYDQQLKAGDNPYLKYNHADAEFQERLKEDTSFGGNLGRAVFQAKKRLLEPLGLVEEAAKTAPGKKRPVEQSPQEPDSSAGIGKSGAQPAKKRLNFGQTGDTESVPDPQPIGEPPAAPSGVGSLTMASGGGAPVADNNEGADGVGSSSGNWHCDSQWLGDRVITTSTRTWALPTYNNHLYKQISNSTSGGSSNDNAYFGYSTPWGYFDFNRFHCHFSPRDWQRLINNNWGFRPKRLNFKLFNIQVKEVTDNNGVKTIANNLTSTVQVFTDSDYQLPYVLGSAHEGCLPPFPADVFMIPQYGYLTLNDGSQAVGRSSFYCLEYFPSQMLRTGNNFQFSYTFENVPFHSSYAHSQSLDRLMNPLIDQYLYYLSKTINGSGQNQQTLKFSVAGPSNMAVQGRNYIPGPSYRQQRVSTTVTQNNNSEFAWPGASSWALNGRNSLMNPGPAMASHKEGEDRFFPLSGSLIFGKQGTGRDNVDADKVMITNEEEIKTTNPVATESYGQVATNHQSARAQAQTGWVQNQGILPGMVWQDRDVYLQGPIWAKIPHTDGNFHPSPLMGGFGMKHPPPQILIKNTPVPADPPTWFNKGKLNSFITQYSTGQVSVEIEWELQKENSKRWNPEIQYTSNYYKSNNVEFAVNTEGVYSEPRPIGTRYLTRNL

SEQ ID NO: 585 - DNA, 2208 bp, synthetic construct
  misc_feature 1..2208: note = Adeno Associated Virus Capsid Protein Variant
  source 1..2208: mol_type = other DNA
atggctgccgatggttatcttccagattggctcgaggacaaccttagtgaaggaattcgcgagtggtgggctttgaaacctggagcccctcaacccaaggcaaatcaacaacatcaagacaacgctcgaggtcttgtgcttccgggttacaaataccttggacccggcaacggactcgacaagggggagccggtcaacgcagcagacgcggcggccctcgagcacgacaaggcctacgaccagcagctcaaggccggagacaacccgtacctcaagtacaaccacgccgacgccgagttccaggagcggctcaaagaagatacgtcttttgggggcaacctcgggcgagcagtcttccaggccaaaaagaggcttcttgaacctcttggtctggttgaggaagcggctaagacggctcctggaaagaagaggcctgtagagcagtctcctcaggaaccggactcctccgcgggtattggcaaatcgggtgcacagcccgctaaaaagagactcaatttcggtcagactggcgacacagagtcagtcccagaccctcaaccaatcggagaacctcccgcagccccctcaggtgtgggatctcttacaatggcttcaggtggtggcgcaccagtggcagacaataacgaaggtgccgatggagtgggtagttcctcgggaaattggcattgcgattcccaatggctgggggacagagtcatcaccaccagcacccgaacctgggccctgcccacctacaacaatcacctctacaagcaaatctccaacagcacatctggaggatcttcaaatgacaacgcctacttcggctacagcaccccctgggggtattttgacttcaacagattccactgccacttctcaccacgtgactggcagcgactcatcaacaacaactggggattccggcctaagcgactcaacttcaagctcttcaacattcaggtcaaagaggttacggacaacaatggagtcaagaccatcgccaataaccttaccagcacggtccaggtcttcacggactcagactatcagctcccgtacgtgctcgggtcggctcacgagggctgcctcccgccgttcccagcggacgttttcatgattcctcagtacgggtatctgacgcttaatgatggaagccaggccgtgggtcgttcgtccttttactgcctggaatatttcccgtcgcaaatgctaagaacgggtaacaacttccagttcagctacgagtttgagaacgtacctttccatagcagctacgctcacagccaaagcctggaccgactaatgaatccactcatcgaccaatacttgtactatctctcaaagactattaacggttctggacagaatcaacaaacgctaaaattcagtgtggccggacccagcaacatggctgtccagggaagaaactacatacctggacccagctaccgacaacaacgtgtctcaaccactgtgactcaaaacaacaacagcgaatttgcttggcctggagcttcttcttgggctctcaatggacgtaatagcttgatgaatcctggacctgctatggccagccacaaagaaggagaggaccgtttctttcctttgtctggatctttaatttttggcaaacaaggaactggaagagacaacgtggatgcggacaaagtcatgataaccaacgaagaagaaattaaaactactaacccggtagcaacggagtcctatggacaagtggccacaaaccaccagagtgcccgggcacaggcgcagaccggctgggttcaaaaccaaggaatacttccgggtatggtttggcaggacagagatgtgtacctgcaaggacccatttgggccaaaattcctcacacggacggcaactttcacccttctccgctgatgggagggtttggaatgaagcacccgcctcctcagatcctcatcaaaaacacacctgtacctgcggatcctccaacggccttcaacggcggcaagctgaactctttcatcacccagtattctactggccaagtcagcgtggagatcgagtgggagctgcagaaggaaaacagcaagcgctggaacccggagatccagtacacttccaactattacaagtctaataatgttgaatttgctgttaatactgaaggtgtatatagtgaaccccgccccattggcaccagatacctgactcgtaatctg

SEQ ID NO: 586 - protein, 736 aa, synthetic construct
  REGION 1..736: note = Adeno Associated Virus Capsid Protein Variant
MAADGYLPDWLEDNLSEGIREWWALKPGAPQPKANQQHQDNARGLVLPGYKYLGPGNGLDKGEPVNAADAAALEHDKAYDQQLKAGDNPYLKYNHADAEFQERLKEDTSFGGNLGRAVFQAKKRLLEPLGLVEEAAKTAPGKKRPVEQSPQEPDSSAGIGKSGAQPAKKRLNFGQTGDTESVPDPQPIGEPPAAPSGVGSLTMASGGGAPVADNNEGADGVGSSSGNWHCDSQWLGDRVITTSTRTWALPTYNNHLYKQISNSTSGGSSNDNAYFGYSTPWGYFDFNRFHCHFSPRDWQRLINNNWGFRPKRLNFKLFNIQVKEVTDNNGVKTIANNLTSTVQVFTDSDYQLPYVLGSAHEGCLPPFPADVFMIPQYGYLTLNDGSQAVGRSSFYCLEYFPSQMLRTGNNFQFSYEFENVPFHSSYAHSQSLDRLMNPLIDQYLYYLSKTINGSGQNQQTLKFSVAGPSNMAVQGRNYIPGPSYRQQRVSTTVTQNNNSEFAWPGASSWALNGRNSLMNPGPAMASHKEGEDRFFPLSGSLIFGKQGTGRDNVDADKVMITNEEEIKTTNPVATESYGQVATNHQSARAQAQTGWVQNQGILPGMVWQDRDVYLQGPIWAKIPHTDGNFHPSPLMGGFGMKHPPPQILIKNTPVPADPPTAFNGGKLNSFITQYSTGQVSVEIEWELQKENSKRWNPEIQYTSNYYKSNNVEFAVNTEGVYSEPRPIGTRYLTRNL

SEQ ID NO: 587 - DNA, 2208 bp, synthetic construct
  misc_feature 1..2208: note = Adeno Associated Virus Capsid Protein Variant
  source 1..2208: mol_type = other DNA
atggctgccgatggttatcttccagattggctcgaggacaaccttagtgaaggaattcgcgagtggtgggctttgaaacctggagcccctcaacccaaggcaaatcaacaacatcaagacaacgctcgaggtcttgtgcttccgggttacaaataccttggacccggcaacggactcgacaagggggagccggtcaacgcagcagacgcggcggccctcgagcacgacaaggcctacgaccagcagctcaaggccggagacaacccgtacctcaagtacaaccacgccgacgccgagttccaggagcggctcaaagaagatacgtcttttgggggcaacctcgggcgagcagtcttccaggccaaaaagaggcttcttgaacctcttggtctggttgaggaagcggctaagacggctcctggaaagaagaggcctgtagagcagtctcctcaggaaccggactcctccgcgggtattggcaaatcgggtgcacagcccgctaaaaagagactcaatttcggtcagactggcgacacagagtcagtcccagaccctcaaccaatcggagaacctcccgcagccccctcaggtgtgggatctcttacaatggcttcaggtggtggcgcaccagtggcagacaataacgaaggtgccgatggagtgggtagttcctcgggaaattggcattgcgattcccaatggctgggggacagagtcatcaccaccagcacccgaacctgggccctgcccacctacaacaatcacctctacaagcaaatctccaacagcacatctggaggatcttcaaatgacaacgcctacttcggctacagcaccccctgggggtattttgacttcaacagattccactgccacttctcaccacgtgactggcagcgactcatcaacaacaactggggattccggcctaagcgactcaacttcaagctcttcaacattcaggtcaaagaggttacggacaacaatggagtcaagaccatcgccaataaccttaccagcacggtccaggtcttcacggactcagactatcagctcccgtacgtgctcgggtcggctcacgagggctgcctcccgccgttcccagcggacgttttcatgattcctcagtacgggtatctgacgcttaatgatggaagccaggccgtgggtcgttcgtccttttactgcctggaatatttcccgtcgcaaatgctaagaacgggtaacaacttccagttcagctacgagtttgagaacgtacctttccatagcagctacgctcacagccaaagcctggaccgactaatgaatccactcatcgaccaatacttgtactatctctcaaagactattaacggttctggacagaatcaacaaacgctaaaattcagtgtggccggacccagcaacatggctgtccagggaagaaactacatacctggacccagctaccgacaacaacgtgtctcaaccactgtgactcaaaacaacaacagcgaatttgcttggcctggagcttcttcttgggctctcaatggacgtaatagcttgatgaatcctggacctgctatggccagccacaaagaaggagaggaccgtttctttcctttgtctggatctttaatttttggcaaacaaggaactggaagagacaacgtggatgcggacaaagtcatgataaccaacgaagaagaaattaaaactactaacccggtagcaacggagtcctatggacaagtggccacaaaccaccagagtgcccgggcacaggcggcgaccggctgggttcaaaaccaaggaatacttccgggtatggtttggcaggacagagatgtgtacctgcaaggacccatttgggccaaaattcctcacacggacggcaactttcacccttctccgctgatgggagggtttggaatgaagcacccgcctcctcagatcctcatcaaaaacacacctgtacctgcggatcctccaacggccttcaacggcggcaagctgaactctttcatcacccagtattctactggccaagtcagcgtggagatcgagtgggagctgcagaaggaaaacagcaagcgctggaacccggagatccagtacacttccaactattacaagtctaataatgttgaatttgctgttaatactgaaggtgtatatagtgaaccccgccccattggcaccagatacctgactcgtaatctg

SEQ ID NO: 588 - protein, 736 aa, synthetic construct
  REGION 1..736: note = Adeno Associated Virus Capsid Protein Variant
MAADGYLPDWLEDNLSEGIREWWALKPGAPQPKANQQHQDNARGLVLPGYKYLGPGNGLDKGEPVNAADAAALEHDKAYDQQLKAGDNPYLKYNHADAEFQERLKEDTSFGGNLGRAVFQAKKRLLEPLGLVEEAAKTAPGKKRPVEQSPQEPDSSAGIGKSGAQPAKKRLNFGQTGDTESVPDPQPIGEPPAAPSGVGSLTMASGGGAPVADNNEGADGVGSSSGNWHCDSQWLGDRVITTSTRTWALPTYNNHLYKQISNSTSGGSSNDNAYFGYSTPWGYFDFNRFHCHFSPRDWQRLINNNWGFRPKRLNFKLFNIQVKEVTDNNGVKTIANNLTSTVQVFTDSDYQLPYVLGSAHEGCLPPFPADVFMIPQYGYLTLNDGSQAVGRSSFYCLEYFPSQMLRTGNNFQFSYEFENVPFHSSYAHSQSLDRLMNPLIDQYLYYLSKTINGSGQNQQTLKFSVAGPSNMAVQGRNYIPGPSYRQQRVSTTVTQNNNSEFAWPGASSWALNGRNSLMNPGPAMASHKEGEDRFFPLSGSLIFGKQGTGRDNVDADKVMITNEEEIKTTNPVATESYGQVATNHQSARAQAATGWVQNQGILPGMVWQDRDVYLQGPIWAKIPHTDGNFHPSPLMGGFGMKHPPPQILIKNTPVPADPPTAFNGGKLNSFITQYSTGQVSVEIEWELQKENSKRWNPEIQYTSNYYKSNNVEFAVNTEGVYSEPRPIGTRYLTRNL

SEQ ID NO: 589 - DNA, 2208 bp, synthetic construct
  misc_feature 1..2208: note = Adeno Associated Virus Capsid Protein Variant
  source 1..2208: mol_type = other DNA
atggctgccgatggttatcttccagattggctcgaggacaaccttagtgaaggaattcgcgagtggtgggctttgaaacctggagcccctcaacccaaggcaaatcaacaacatcaagacaacgctcgaggtcttgtgcttccgggttacaaataccttggacccggcaacggactcgacaagggggagccggtcaacgcagcagacgcggcggccctcgagcacgacaaggcctacgaccagcagctcaaggccggagacaacccgtacctcaagtacaaccacgccgacgccgagttccaggagcggctcaaagaagatacgtcttttgggggcaacctcgggcgagcagtcttccaggccaaaaagaggcttcttgaacctcttggtctggttgaggaagcggctaagacggctcctggaaagaagaggcctgtagagcagtctcctcaggaaccggactcctccgcgggtattggcaaatcgggtgcacagcccgctaaaaagagactcaatttcggtcagactggcgacacagagtcagtcccagaccctcaaccaatcggagaacctcccgcagccccctcaggtgtgggatctcttacaatggcttcaggtggtggcgcaccagtggcagacaataacgaaggtgccgatggagtgggtagttcctcgggaaattggcattgcgattcccaatggctgggggacagagtcatcaccaccagcacccgaacctgggccctgcccacctacaacaatcacctctacaagcaaatctccaacagcacatctggaggatcttcaaatgacaacgcctacttcggctacagcaccccctgggggtattttgacttcaacagattccactgccacttctcaccacgtgactggcagcgactcatcaacaacaactggggattccggcctaagcgactcaacttcaagctcttcaacattcaggtcaaagaggttacggacaacaatggagtcaagaccatcgccaataaccttaccagcacggtccaggtcttcacggactcagactatcagctcccgtacgtgctcgggtcggctcacgagggctgcctcccgccgttcccagcggacgttttcatgattcctcagtacgggtatctgacgcttaatgatggaagccaggccgtgggtcgttcgtccttttactgcctggaatatttcccgtcgcaaatgctaagaacgggtaacaacttccagttcagctacgagtttgagaacgtacctttccatagcagctacgctcacagccaaagcctggaccgactaatgaatccactcatcgaccaatacttgtactatctctcaaagactattaacggttctggacagggccaacaaacgctaaaattcagtgtggccggacccagcaacatggctgtccagggaagaaactacatacctggacccagctaccgacaacaacgtgtctcaaccactgtgctgcaaaacagcaacagcgaatttgcttggcctggagcttcttcttgggctctcaatggacgtaatagcttgatgaatcctggacctgctatggccagccacaaagaaggagaggaccgtttctttcctttgtctggatctttaatttttggcaaacaaggaactggaagagacaacgtggatgcggacaaagtcatgataaccaacgaagaagaaattaaaactactaacccggtagcaacggagtcctatggacaagtggccacaaaccaccagagtgcccgggcacaggcgcagaccggctgggttcaaaaccaaggaatacttccgggtatggtttggcaggacagagatgtgtacctgcaaggacccatttgggccaaaattcctcacacggacggcaactttcacccttctccgctgatgggagggtttggaatgaagcacccgcctcctcagatcctcatcaaaaacacacctgtacctgcggatcctccaacggccttcaacaagggcaagctgaactctttcatcacccagtattctactggccaagtcagcgtggagatcgagtgggagctgcagaaggaaaacagcaagcgctggaacccggagatccagtacacttccaactattacaagtctaataatgttgaatttgctgttaatactgaaggtgtatatagtgaaccccgccccattggcaccagatacctgactcgtaatctg

SEQ ID NO: 590 - protein, 736 aa, synthetic construct
  REGION 1..736: note = Adeno Associated Virus Capsid Protein Variant
MAADGYLPDWLEDNLSEGIREWWALKPGAPQPKANQQHQDNARGLVLPGYKYLGPGNGLDKGEPVNAADAAALEHDKAYDQQLKAGDNPYLKYNHADAEFQERLKEDTSFGGNLGRAVFQAKKRLLEPLGLVEEAAKTAPGKKRPVEQSPQEPDSSAGIGKSGAQPAKKRLNFGQTGDTESVPDPQPIGEPPAAPSGVGSLTMASGGGAPVADNNEGADGVGSSSGNWHCDSQWLGDRVITTSTRTWALPTYNNHLYKQISNSTSGGSSNDNAYFGYSTPWGYFDFNRFHCHFSPRDWQRLINNNWGFRPKRLNFKLFNIQVKEVTDNNGVKTIANNLTSTVQVFTDSDYQLPYVLGSAHEGCLPPFPADVFMIPQYGYLTLNDGSQAVGRSSFYCLEYFPSQMLRTGNNFQFSYEFENVPFHSSYAHSQSLDRLMNPLIDQYLYYLSKTINGSGQGQQTLKFSVAGPSNMAVQGRNYIPGPSYRQQRVSTTVLQNSNSEFAWPGASSWALNGRNSLMNPGPAMASHKEGEDRFFPLSGSLIFGKQGTGRDNVDADKVMITNEEEIKTTNPVATESYGQVATNHQSARAQAQTGWVQNQGILPGMVWQDRDVYLQGPIWAKIPHTDGNFHPSPLMGGFGMKHPPPQILIKNTPVPADPPTAFNKGKLNSFITQYSTGQVSVEIEWELQKENSKRWNPEIQYTSNYYKSNNVEFAVNTEGVYSEPRPIGTRYLTRNL

SEQ ID NO: 591 - DNA, 2208 bp, synthetic construct
  misc_feature 1..2208: note = Adeno Associated Virus Capsid Protein Variant
  source 1..2208: mol_type = other DNA
atggctgccgatggttatcttccagattggctcgaggacaaccttagtgaaggaattcgcgagtggtgggctttgaaacctggagcccctcaacccaaggcaaatcaacaacatcaagacaacgctcgaggtcttgtgcttccgggttacaaataccttggacccggcaacggactcgacaagggggagccggtcaacgcagcagacgcggcggccctcgagcacgacaaggcctacgaccagcagctcaaggccggagacaacccgtacctcaagtacaaccacgccgacgccgagttccaggagcggctcaaagaagatacgtcttttgggggcaacctcgggcgagcagtcttccaggccaaaaagaggcttcttgaacctcttggtctggttgaggaagcggctaagacggctcctggaaagaagaggcctgtagagcagtctcctcaggaaccggactcctccgcgggtattggcaaatcgggtgcacagcccgctaaaaagagactcaatttcggtcagactggcgacacagagtcagtcccagaccctcaaccaatcggagaacctcccgcagccccctcaggtgtgggatctcttacaatggcttcaggtggtggcgcaccagtggcagacaataacgaaggtgccgatggagtgggtagttcctcgggaaattggcattgcgattcccaatggctgggggacagagtcatcaccaccagcacccgaacctgggccctgcccacctacaacaatcacctctacaagcaaatctccaacagcacatctggaggatcttcaaatgacaacgcctacttcggctacagcaccccctgggggtattttgacttcaacagattccactgccacttctcaccacgtgactggcagcgactcatcaacaacaactggggattccggcctaagcgactcaacttcaagctcttcaacattcaggtcaaagaggttacggacaacaatggagtcaagaccatcgccaataaccttaccagcacggtccaggtcttcacggactcagactatcagctcccgtacgtgctcgggtcggctcacgagggctgcctcccgccgttcccagcggacgttttcatgattcctcagtacgggtatctgacgcttaatgatggaagccaggccgtgggtcgttcgtccttttactgcctggaatatttcccgtcgcaaatgctaagaacgggtaacaacttccagttcagctacgagtttgagaacgtacctttccatagcagctacgctcacagccaaagcctggaccgactaatgaatccactcatcgaccaatacttgtactatctctcaaagactattaacggttctggacagggccaacaaacgctaaaattcagtgtggccggacccagcaacatggctgtccagggaagaaactacatacctggacccagctaccgacaacaacgtgtctcaaccactgtgactcaaaacaacaacagcgaatttgcttggcctggagcttcttcttgggctctcaatggacgtaatagcttgatgaatcctggacctgctatggccagccacaaagaaggagaggaccgtttctttcctttgtctggatctttaatttttggcaaacaaggaactggaagagacaacgtggatgcggacaaagtcatgataaccaacgaagaagaaattaaaactactaacccggtagcaacggagtcctatggacaagtggccacaaaccaccagagtgcccgggcacaggcgcagaccggctgggttcaaaaccaaggaatacttccgggtatggtttggcaggacagagatgtgtacctgcaaggacccatttgggccaaaattcctcacacggacggcaactttcacccttctccgctgatgggagggtttggaatgaagcacccgcctcctcagatcctcatcaaaaacacacctgtacctgcggatcctccaacgcacttcaacggcggcaagctgaactctttcatcacccagtattctactggccaagtcagcgtggagatcgagtgggagctgcagaaggaaaacagcaagcgctggaacccggagatccagtacacttccaactattacaagtctaataatgttgaatttgctgttaatactgaaggtgtatatagtgaaccccgccccattggcaccagatacctgactcgtaatctg

SEQ ID NO: 592 - protein, 736 aa, synthetic construct
  REGION 1..736: note = Adeno Associated Virus Capsid Protein Variant
MAADGYLPDWLEDNLSEGIREWWALKPGAPQPKANQQHQDNARGLVLPGYKYLGPGNGLDKGEPVNAADAAALEHDKAYDQQLKAGDNPYLKYNHADAEFQERLKEDTSFGGNLGRAVFQAKKRLLEPLGLVEEAAKTAPGKKRPVEQSPQEPDSSAGIGKSGAQPAKKRLNFGQTGDTESVPDPQPIGEPPAAPSGVGSLTMASGGGAPVADNNEGADGVGSSSGNWHCDSQWLGDRVITTSTRTWALPTYNNHLYKQISNSTSGGSSNDNAYFGYSTPWGYFDFNRFHCHFSPRDWQRLINNNWGFRPKRLNFKLFNIQVKEVTDNNGVKTIANNLTSTVQVFTDSDYQLPYVLGSAHEGCLPPFPADVFMIPQYGYLTLNDGSQAVGRSSFYCLEYFPSQMLRTGNNFQFSYEFENVPFHSSYAHSQSLDRLMNPLIDQYLYYLSKTINGSGQGQQTLKFSVAGPSNMAVQGRNYIPGPSYRQQRVSTTVTQNNNSEFAWPGASSWALNGRNSLMNPGPAMASHKEGEDRFFPLSGSLIFGKQGTGRDNVDADKVMITNEEEIKTTNPVATESYGQVATNHQSARAQAQTGWVQNQGILPGMVWQDRDVYLQGPIWAKIPHTDGNFHPSPLMGGFGMKHPPPQILIKNTPVPADPPTHFNGGKLNSFITQYSTGQVSVEIEWELQKENSKRWNPEIQYTSNYYKSNNVEFAVNTEGVYSEPRPIGTRYLTRNL

SEQ ID NO: 593 - DNA, 2208 bp, synthetic construct
  misc_feature 1..2208: note = Adeno Associated Virus Capsid Protein Variant
  source 1..2208: mol_type = other DNA
atggctgccgatggttatcttccagattggctcgaggacaaccttagtgaaggaattcgcgagtggtgggctttgaaacctggagcccctcaacccaaggcaaatcaacaacatcaagacaacgctcgaggtcttgtgcttccgggttacaaataccttggacccggcaacggactcgacaagggggagccggtcaacgcagcagacgcggcggccctcgagcacgacaaggcctacgaccagcagctcaaggccggagacaacccgtacctcaagtacaaccacgccgacgccgagttccaggagcggctcaaagaagatacgtcttttgggggcaacctcgggcgagcagtcttccaggccaaaaagaggcttcttgaacctcttggtctggttgaggaagcggctaagacggctcctggaaagaagaggcctgtagagcagtctcctcaggaaccggactcctccgcgggtattggcaaatcgggtgcacagcccgctaaaaagagactcaatttcggtcagactggcgacacagagtcagtcccagaccctcaaccaatcggagaacctcccgcagccccctcaggtgtgggatctcttacaatggcttcaggtggtggcgcaccagtggcagacaataacgaaggtgccgatggagtgggtagttcctcgggaaattggcattgcgattcccaatggctgggggacagagtcatcaccaccagcacccgaacctgggccctgcccacctacaacaatcacctctacaagcaaatctccaacagcacatctggaggatcttcaaatgacaacgcctacttcggctacagcaccccctgggggtattttgacttcaacagattccactgccacttctcaccacgtgactggcagcgactcatcaacaacaactggggattccggcctaagcgactcaacttcaagctcttcaacattcaggtcaaagaggttacggacaacaatggagtcaagaccatcgccaataaccttaccagcacggtccaggtcttcacggactcagactatcagctcccgtacgtgctcgggtcggctcacgagggctgcctcccgccgttcccagcggacgttttcatgattcctcagtacgggtatctgacgcttaatgatggaagccaggccgtgggtcgttcgtccttttactgcctggaatatttcccgtcgcaaatgctaagaacgggtaacaacttccagttcagctacgagtttgagaacgtacctttccatagcagctacgctcacagccaaagcctggaccgactaatgaatccactcatcgaccaatacttgtactatctctcaaagactattaacggttctggatttaatcaacaaacgctaaaattcagtgtggccggacccagcaacatggctgtccagggaagaaactacatacctggacccagctaccgacaacaacgtgtctcaaccactgtgactcaaaacagcaacagcgaatttgcttggcctggagcttcttcttgggctctcaatggacgtaatagcttgatgaatcctggacctgctatggccagccacaaagaaggagaggaccgtttctttcctttgtctggatctttaatttttggcaaacaaggaactggaagagacaacgtggatgcggacaaagtcatgataaccaacgaagaagaaattaaaactactaacccggtagcaacggagtcctatggacaagtggccacaaaccaccagagtgcccgggcacaggcggcgaccggctgggttcaaaaccaaggaatacttccgggtatggtttggcaggacagagatgtgtacctgcaaggacccatttgggccaaaattcctcacacggacggcaactttcacccttctccgctgatgggagggtttggaatgaagcacccgcctcctcagatcctcatcaaaaacacacctgtacctgcggatcctccaacggccttcaacaagggcaagctgaactctttcatcacccagtattctactggccaagtcagcgtggagatcgagtgggagctgcagaaggaaaacagcaagcgctggaacccggagatccagtacacttccaactattacaagtctaataatgttgaatttgctgttaatactgaaggtgtatatagtgaaccccgccccattggcaccagatacctgactcgtaatctg

SEQ ID NO: 594 - protein, 736 aa, synthetic construct
  REGION 1..736: note = Adeno Associated Virus Capsid Protein Variant
MAADGYLPDWLEDNLSEGIREWWALKPGAPQPKANQQHQDNARGLVLPGYKYLGPGNGLDKGEPVNAADAAALEHDKAYDQQLKAGDNPYLKYNHADAEFQERLKEDTSFGGNLGRAVFQAKKRLLEPLGLVEEAAKTAPGKKRPVEQSPQEPDSSAGIGKSGAQPAKKRLNFGQTGDTESVPDPQPIGEPPAAPSGVGSLTMASGGGAPVADNNEGADGVGSSSGNWHCDSQWLGDRVITTSTRTWALPTYNNHLYKQISNSTSGGSSNDNAYFGYSTPWGYFDFNRFHCHFSPRDWQRLINNNWGFRPKRLNFKLFNIQVKEVTDNNGVKTIANNLTSTVQVFTDSDYQLPYVLGSAHEGCLPPFPADVFMIPQYGYLTLNDGSQAVGRSSFYCLEYFPSQMLRTGNNFQFSYEFENVPFHSSYAHSQSLDRLMNPLIDQYLYYLSKTINGSGFNQQTLKFSVAGPSNMAVQGRNYIPGPSYRQQRVSTTVTQNSNSEFAWPGASSWALNGRNSLMNPGPAMASHKEGEDRFFPLSGSLIFGKQGTGRDNVDADKVMITNEEEIKTTNPVATESYGQVATNHQSARAQAATGWVQNQGILPGMVWQDRDVYLQGPIWAKIPHTDGNFHPSPLMGGFGMKHPPPQILIKNTPVPADPPTAFNKGKLNSFITQYSTGQVSVEIEWELQKENSKRWNPEIQYTSNYYKSNNVEFAVNTEGVYSEPRPIGTRYLTRNL

SEQ ID NO: 595 - DNA, 2208 bp, synthetic construct
  misc_feature 1..2208: note = Adeno Associated Virus Capsid Protein Variant
  source 1..2208: mol_type = other DNA
atggctgccgatggttatcttccagattggctcgaggacaaccttagtgaaggaattcgcgagtggtgggctttgaaacctggagcccctcaacccaaggcaaatcaacaacatcaagacaacgctcgaggtcttgtgcttccgggttacaaataccttggacccggcaacggactcgacaagggggagccggtcaacgcagcagacgcggcggccctcgagcacgacaaggcctacgaccagcagctcaaggccggagacaacccgtacctcaagtacaaccacgccgacgccgagttccaggagcggctcaaagaagatacgtcttttgggggcaacctcgggcgagcagtcttccaggccaaaaagaggcttcttgaacctcttggtctggttgaggaagcggctaagacggctcctggaaagaagaggcctgtagagcagtctcctcaggaaccggactcctccgcgggtattggcaaatcgggtgcacagcccgctaaaaagagactcaatttcggtcagactggcgacacagagtcagtcccagaccctcaaccaatcggagaacctcccgcagccccctcaggtgtgggatctcttacaatggcttcaggtggtggcgcaccagtggcagacaataacgaaggtgccgatggagtgggtagttcctcgggaaattggcattgcgattcccaatggctgggggacagagtcatcaccaccagcacccgaacctgggccctgcccacctacaacaatcacctctacaagcaaatctccaacagcacatctggaggatcttcaaatgacaacgcctacttcggctacagcaccccctgggggtattttgacttcaacagattccactgccacttctcaccacgtgactggcagcgactcatcaacaacaactggggattccggcctaagcgactcaacttcaagctcttcaacattcaggtcaaagaggttacggacaacaatggagtcaagaccatcgccaataaccttaccagcacggtccaggtcttcacggactcagactatcagctcccgtacgtgctcgggtcggctcacgagggctgcctcccgccgttcccagcggacgttttcatgattcctcagtacgggtatctgacgcttaatgatggaagccaggccgtgggtcgttcgtccttttactgcctggaatatttcccgtcgcaaatgctaagaacgggtaacaacttccagttcagctacgagtttgagaacgtacctttccatagcagctacgctcacagccaaagcctggaccgactaatgaatccactcatcgaccaatacttgtactatctctcaaagactattaacggttctggacagaatcaacaaacgctaaaattcagtgtggccggacccagcaacatggctgtccagggaagaaactacatacctggacccagctaccgacaacaacgtgtctcaaccactgtgactcaaaacagcaacagcgaatttgcttggccttacgcttcttcttgggctctcaatggacgtaatagcttgatgaatcctggacctgctatggccagccacaaagaaggagaggaccgtttctttcctttgtctggatctttaatttttggcaaacaaggaactggaagagacaacgtggatgcggacaaagtcatgataaccaacgaagaagaaattaaaactactaacccggtagcaacggagtcctatggacaagtggccacaaaccaccagagtgcccgggcacaggcgcagaccggctgggttcaaaaccaaggaatacttccgggtatggtttggcaggacagagatgtgtacctgcaaggacccatttgggccaaaattcctcacacggacggcaactttcacccttctccgctgatgggagggtttggaatgaagcacccgcctcctcagatcctcatcaaaaacacacctgtacctgcggatcctccaacggccttcaacaagggcaagctgaactctttcatcacccagtattctactggccaagtcagcgtggagatcgagtgggagctgcagaaggaaaacagcaagcgctggaacccggagatccagtacacttccaactattacaagtctaataatgttgaatttgctgttaatactgaaggtgtatatagtgaaccccgccccattggcaccagatacctgactcgtaatctg

SEQ ID NO: 596 - protein, 736 aa, synthetic construct
  REGION 1..736: note = Adeno Associated Virus Capsid Protein Variant
MAADGYLPDWLEDNLSEGIREWWALKPGAPQPKANQQHQDNARGLVLPGYKYLGPGNGLDKGEPVNAADAAALEHDKAYDQQLKAGDNPYLKYNHADAEFQERLKEDTSFGGNLGRAVFQAKKRLLEPLGLVEEAAKTAPGKKRPVEQSPQEPDSSAGIGKSGAQPAKKRLNFGQTGDTESVPDPQPIGEPPAAPSGVGSLTMASGGGAPVADNNEGADGVGSSSGNWHCDSQWLGDRVITTSTRTWALPTYNNHLYKQISNSTSGGSSNDNAYFGYSTPWGYFDFNRFHCHFSPRDWQRLINNNWGFRPKRLNFKLFNIQVKEVTDNNGVKTIANNLTSTVQVFTDSDYQLPYVLGSAHEGCLPPFPADVFMIPQYGYLTLNDGSQAVGRSSFYCLEYFPSQMLRTGNNFQFSYEFENVPFHSSYAHSQSLDRLMNPLIDQYLYYLSKTINGSGQNQQTLKFSVAGPSNMAVQGRNYIPGPSYRQQRVSTTVTQNSNSEFAWPYASSWALNGRNSLMNPGPAMASHKEGEDRFFPLSGSLIFGKQGTGRDNVDADKVMITNEEEIKTTNPVATESYGQVATNHQSARAQAQTGWVQNQGILPGMVWQDRDVYLQGPIWAKIPHTDGNFHPSPLMGGFGMKHPPPQILIKNTPVPADPPTAFNKGKLNSFITQYSTGQVSVEIEWELQKENSKRWNPEIQYTSNYYKSNNVEFAVNTEGVYSEPRPIGTRYLTRNL

SEQ ID NO: 597 - DNA, 2208 bp, synthetic construct
  misc_feature 1..2208: note = Adeno Associated Virus Capsid Protein Variant
  source 1..2208: mol_type = other DNA
atggctgccgatggttatcttccagattggctcgaggacaaccttagtgaaggaattcgcgagtggtgggctttgaaacctggagcccctcaacccaaggcaaatcaacaacatcaagacaacgctcgaggtcttgtgcttccgggttacaaataccttggacccggcaacggactcgacaagggggagccggtcaacgcagcagacgcggcggccctcgagcacgacaaggcctacgaccagcagctcaaggccggagacaacccgtacctcaagtacaaccacgccgacgccgagttccaggagcggctcaaagaagatacgtcttttgggggcaacctcgggcgagcagtcttccaggccaaaaagaggcttcttgaacctcttggtctggttgaggaagcggctaagacggctcctggaaagaagaggcctgtagagcagtctcctcaggaaccggacggttccgcgggtattggcaaatcgggtgcacagcccgctaaaaagagactcaatttcggtcagactggcgacacagagtcagtcccagaccctcaaccaatcggagaacctcccgcagccccctcaggtgtgggatctcttacaatggcttcaggtggtggcgcaccagtggcagacaataacgaaggtgccgatggagtgggtagttcctcgggaaattggcattgcgattcccaatggctgggggacagagtcatcaccaccagcacccgaacctgggccctgcccacctacaacaatcacctctacaagcaaatctccaacagcacatctggaggatcttcaaatgacaacgcctacttcggctacagcaccccctgggggtattttgacttcaacagattccactgccacttctcaccacgtgactggcagcgactcatcaacaacaactggggattccggcctaagcgactcaacttcaagctcttcaacattcaggtcaaagaggttacggacaacaatggagtcaagaccatcgccaataaccttaccagcacggtccaggtcttcacggactcagactatcagctcccgtacgtgctcgggtcggctcacgagggctgcctcccgccgttcccagcggacgttttcatgattcctcagtacgggtatctgacgcttaatgatggaagccaggccgtgggtcgttcgtccttttactgcctggaatatttcccgtcgcaaatgctaagaacgggtaacaacttccagttcagctacgagtttgagaacgtacctttccatagcagctacgctcacagccaaagcctggaccgactaatgaatccactcatcgaccaatacttgtactatctctcaaagactattaacggttctggacagaatcaacaaacgctaaaattcagtgtggccggacccagcaacatggctgtccagggaagaaactacatacctggacccagctaccgacaacaacgtgtctcaaccactgtgactcaaaacaacaacagcgaatttgcttggcctggagcttcttcttgggctctcaatggacgtaatagcttgatgaatcctggacctgctatggccagccacaaagaaggagaggaccgtttctttcctttgtctggatctttaatttttggcaaacaaggaactggaagagacaacgtggatgcggacaaagtcatgataaccaacgaagaagaaattaaaactactaacccggtagcaacggagtcctatggacaagtggccacaaaccaccagagtgcccgggcacaggcgcagaccggctgggttcaaaaccaaggaatacttccgggtatggtttggcaggacagagatgtgtacctgcaaggacccatttgggccaaaattcctcacacggacggcaactttcacccttctccgctgatgggagggtttggaatgaagcacccgcctcctcagatcctcatcaaaaacacacctgtacctgcggatcctccaacggccttcaacaagggcaagctgaactctttcatcacccagtattctactggccaagtcagcgtggagatcgagtgggagctgcagaaggaaaacagcaagcgctggaacccggagatccagtacacttccaactattacaagtctaataatgttgaatttgctgttaatactgaaggtgtatatagtgaaccccgccccattggcaccagatacctgactcgtaatctg

SEQ ID NO: 598 - protein, 736 aa, synthetic construct
  REGION 1..736: note = Adeno Associated Virus Capsid Protein Variant
MAADGYLPDWLEDNLSEGIREWWALKPGAPQPKANQQHQDNARGLVLPGYKYLGPGNGLDKGEPVNAADAAALEHDKAYDQQLKAGDNPYLKYNHADAEFQERLKEDTSFGGNLGRAVFQAKKRLLEPLGLVEEAAKTAPGKKRPVEQSPQEPDGSAGIGKSGAQPAKKRLNFGQTGDTESVPDPQPIGEPPAAPSGVGSLTMASGGGAPVADNNEGADGVGSSSGNWHCDSQWLGDRVITTSTRTWALPTYNNHLYKQISNSTSGGSSNDNAYFGYSTPWGYFDFNRFHCHFSPRDWQRLINNNWGFRPKRLNFKLFNIQVKEVTDNNGVKTIANNLTSTVQVFTDSDYQLPYVLGSAHEGCLPPFPADVFMIPQYGYLTLNDGSQAVGRSSFYCLEYFPSQMLRTGNNFQFSYEFENVPFHSSYAHSQSLDRLMNPLIDQYLYYLSKTINGSGQNQQTLKFSVAGPSNMAVQGRNYIPGPSYRQQRVSTTVTQNNNSEFAWPGASSWALNGRNSLMNPGPAMASHKEGEDRFFPLSGSLIFGKQGTGRDNVDADKVMITNEEEIKTTNPVATESYGQVATNHQSARAQAQTGWVQNQGILPGMVWQDRDVYLQGPIWAKIPHTDGNFHPSPLMGGFGMKHPPPQILIKNTPVPADPPTAFNKGKLNSFITQYSTGQVSVEIEWELQKENSKRWNPEIQYTSNYYKSNNVEFAVNTEGVYSEPRPIGTRYLTRNL

SEQ ID NO: 599 - DNA, 2208 bp, synthetic construct
  misc_feature 1..2208: note = Adeno Associated Virus Capsid Protein Variant
  source 1..2208: mol_type = other DNA
atggctgccgatggttatcttccagattggctcgaggacaaccttagtgaaggaattcgcgagtggtgggctttgaaacctggagcccctcaacccaaggcaaatcaacaacatcaagacaacgctcgaggtcttgtgcttccgggttacaaataccttggacccggcaacggactcgacaagggggagccggtcaacgcagcagacgcggcggccctcgagcacgacaaggcctacgaccagcagctcaaggccggagacaacccgtacctcaagtacaaccacgccgacgccgagttccaggagcggctcaaagaagatacgtcttttgggggcaacctcgggcgagcagtcttccaggccaaaaagaggcttcttgaacctcttggtctggttgaggaagcggctaagacggctcctggaaagaagaggcctgtagagcagtctcctcaggaaccggactcctccgcgggtattggcaaatcgggtgcacagcccgctaaaaagagactcaatttcggtcagactggcgacacagagtcagtcccagaccctcaaccaatcggagaacctcccgcagccccctcaggtgtgggatctcttacaatggcttcaggtggtggcgcaccagtggcagacaataacgaaggtgccgatggagtgggtagttcctcgggaaattggcattgcgattcccaatggctgggggacagagtcatcaccaccagcacccgaacctgggccctgcccacctacaacaatcacctctacaagcaaatctccaacagcacatctggaggatcttcaaatgacaacgcctacttcggctacagcaccccctgggggtattttgacttcaacagattccactgccacttctcaccacgtgactggcagcgactcatcaacaacaactggggattccggcctaagcgactcaacttcaagctcttcaacattcaggtcaaagaggttacggacaacaatggagtcaagaccatcgccaataaccttaccagcacggtccaggtcttcacggactcagactatcagctcccgtacgtgctcgggtcggctcacgagggctgcctcccgccgttcccagcggacgttttcatgattcctcagtacgggtatctgacgcttaatgatggaagccaggccgtgggtcgttcgtccttttactgcctggaatatttcccgtcgcaaatgctaagaacgggtaacaacttccagttcagctacgagtttgagaacgtacctttccatagcagctacgctcacagccaaagcctggaccgactaatgaatccactcatcgaccaatacttgtactatctctcaaagactattaacggttctggacagaatcaacaaacgctaaaattcagtgtggccggacccagcaacatggctgtccagggaagaaactacatacctggacccagctaccgacaacaacgtgtctcaaccactgtgactcaaaacaacaacagcgaatttgcttggcctggagcttcttcttgggctctcaatggacgtaatagcttgatgaatcctggacctgctatggccagccacaaagaaggagaggaccgtttctttcctttgtctggatctttaatttttggcaaacaaggaactggaagagacaacgtggatgcggacaaagtcatgataaccaacgaagaagaaattaaaactactaacccggtagcaacggagtcctatggacaagtggccacaaaccaccagagtgcccgggcacaggcgcagaccggctgggttcaaaaccaaggaatacttccgggtatggtttggcaggacagagatgtgtacctgcaaggacccatttgggccaaaattcctcacacggacggcaactttcacccttctccgctgatgggagggtttggaatgaagcacccgcctcctcagatcctcatcaaaaacacacctgtacctgcggatcctccaacggccttccgcaagggcaagctgaactctttcatcacccagtattctactggccaagtcagcgtggagatcgagtgggagctgcagaaggaaaacagcaagcgctggaacccggagatccagtacacttccaactattacaagtctaataatgttgaatttgctgttaatactgaaggtgtatatagtgaaccccgccccattggcaccagatacctgactcgtaatctg

SEQ ID NO: 600 - protein, 736 aa, synthetic construct
  REGION 1..736: note = Adeno Associated Virus Capsid Protein Variant
MAADGYLPDWLEDNLSEGIREWWALKPGAPQPKANQQHQDNARGLVLPGYKYLGPGNGLDKGEPVNAADAAALEHDKAYDQQLKAGDNPYLKYNHADAEFQERLKEDTSFGGNLGRAVFQAKKRLLEPLGLVEEAAKTAPGKKRPVEQSPQEPDSSAGIGKSGAQPAKKRLNFGQTGDTESVPDPQPIGEPPAAPSGVGSLTMASGGGAPVADNNEGADGVGSSSGNWHCDSQWLGDRVITTSTRTWALPTYNNHLYKQISNSTSGGSSNDNAYFGYSTPWGYFDFNRFHCHFSPRDWQRLINNNWGFRPKRLNFKLFNIQVKEVTDNNGVKTIANNLTSTVQVFTDSDYQLPYVLGSAHEGCLPPFPADVFMIPQYGYLTLNDGSQAVGRSSFYCLEYFPSQMLRTGNNFQFSYEFENVPFHSSYAHSQSLDRLMNPLIDQYLYYLSKTINGSGQNQQTLKFSVAGPSNMAVQGRNYIPGPSYRQQRVSTTVTQNNNSEFAWPGASSWALNGRNSLMNPGPAMASHKEGEDRFFPLSGSLIFGKQGTGRDNVDADKVMITNEEEIKTTNPVATESYGQVATNHQSARAQAQTGWVQNQGILPGMVWQDRDVYLQGPIWAKIPHTDGNFHPSPLMGGFGMKHPPPQILIKNTPVPADPPTAFRKGKLNSFITQYSTGQVSVEIEWELQKENSKRWNPEIQYTSNYYKSNNVEFAVNTEGVYSEPRPIGTRYLTRNL

SEQ ID NO: 601 - DNA, 2208 bp, synthetic construct
  misc_feature 1..2208: note = Adeno Associated Virus Capsid Protein Variant
  source 1..2208: mol_type = other DNA
atggctgccgatggttatcttccagattggctcgaggacaaccttagtgaaggaattcgcgagtggtgggctttgaaacctggagcccctcaacccaaggcaaatcaacaacatcaagacaacgctcgaggtcttgtgcttccgggttacaaataccttggacccggcaacggactcgacaagggggagccggtcaacgcagcagacgcggcggccctcgagcacgacaaggcctacgaccagcagctcaaggccggagacaacccgtacctcaagtacaaccacgccgacgccgagttccaggagcggctcaaagaagatacgtcttttgggggcaacctcgggcgagcagtcttccaggccaaaaagaggcttcttgaacctcttggtctggttgaggaagcggctaagacggctcctggaaagaagaggcctgtagagcagtctcctcaggaaccggactcctccgcgggtattggcaaatcgggtgcacagcccgctaaaaagagactcaatttcggtcagactggcgacacagagtcagtcccagaccctcaaccaatcggagaacctcccgcagccccctcaggtgtgggatctcttacaatggcttcaggtggtggcgcaccagtggcagacaataacgaaggtgccgatggagtgggtagttcctcgggaaattggcattgcgattcccaatggctgggggacagagtcatcaccaccagcacccgaacctgggccctgcccacctacaacaatcacctctacaagcaaatctccaacagcacatctggaggatcttcaaatgacaacgcctacttcggctacagcaccccctgggggtattttgacttcaacagattccactgccacttctcaccacgtgactggcagcgactcatcaacaacaactggggattccggcctaagcgactcaacttcaagctcttcaacattcaggtcaaagaggttacggacaacaatggagtcaagaccatcgccaataaccttaccagcacggtccaggtcttcacggactcagactatcagctcccgtacgtgctcgggtcggctcacgagggctgcctcccgccgttcccagcggacgttttcatgattcctcagtacgggtatctgacgcttaatgatggaagccaggccgtgggtcgttcgtccttttactgcctggaatatttcgcgtcgcaaatgctaagaacgggtaacaacttccagttcagctacgagtttgagaacgtacctttccatagcagctacgctcacagccaaagcctggaccgactaatgaatccactcatcgaccaatacttgtactatctctcaaagactattaacggttctggacagaatcaacaaacgctaaaattcagtgtggccggacccagcaacatggctgtccagggaagaaactacatacctggacccagctaccgacaacaacgtgtctcaaccactgtgactcaaaacaacaacagcgaatttgcttggcctggagcttcttcttgggctctcaatggacgtaatagcttgatgaatcctggacctgctatggccagccacaaagaaggagaggaccgtttctttcctttgtctggatctttaatttttggcaaacaaggaactggaagagacaacgtggatgcggacaaagtcatgataaccaacgaagaagaaattaaaactactaacccggtagcaacggagtcctatggacaagtggccacaaaccaccagagtgcccgggcacaggcgcagaccggctgggttcaaaaccaaggaatacttccgggtatggtttggcaggacagagatgtgtacctgcaaggacccatttgggccaaaattcctcacacggacggcaactttcacccttctccgctgatgggagggtttggaatgaagcacccgcctcctcagatcctcatcaaaaacacacctgtacctgcggatcctccaacggccttcaacaagggcaagctgaactctttcatcacccagtattctactggccaagtcagcgtggagatcgagtgggagctgcagaaggaaaacagcaagcgctggaacccggagatccagtacacttccaactattacaagtctaataatgttgaatttgctgttaatactgaaggtgtatatagtgaaccccgccccattggcaccagatacctgactcgtaatctg

SEQ ID NO: 602 - protein, 736 aa, synthetic construct
  REGION 1..736: note = Adeno Associated Virus Capsid Protein Variant
MAADGYLPDWLEDNLSEGIREWWALKPGAPQPKANQQHQDNARGLVLPGYKYLGPGNGLDKGEPVNAADAAALEHDKAYDQQLKAGDNPYLKYNHADAEFQERLKEDTSFGGNLGRAVFQAKKRLLEPLGLVEEAAKTAPGKKRPVEQSPQEPDSSAGIGKSGAQPAKKRLNFGQTGDTESVPDPQPIGEPPAAPSGVGSLTMASGGGAPVADNNEGADGVGSSSGNWHCDSQWLGDRVITTSTRTWALPTYNNHLYKQISNSTSGGSSNDNAYFGYSTPWGYFDFNRFHCHFSPRDWQRLINNNWGFRPKRLNFKLFNIQVKEVTDNNGVKTIANNLTSTVQVFTDSDYQLPYVLGSAHEGCLPPFPADVFMIPQYGYLTLNDGSQAVGRSSFYCLEYFASQMLRTGNNFQFSYEFENVPFHSSYAHSQSLDRLMNPLIDQYLYYLSKTINGSGQNQQTLKFSVAGPSNMAVQGRNYIPGPSYRQQRVSTTVTQNNNSEFAWPGASSWALNGRNSLMNPGPAMASHKEGEDRFFPLSGSLIFGKQGTGRDNVDADKVMITNEEEIKTTNPVATESYGQVATNHQSARAQAQTGWVQNQGILPGMVWQDRDVYLQGPIWAKIPHTDGNFHPSPLMGGFGMKHPPPQILIKNTPVPADPPTAFNKGKLNSFITQYSTGQVSVEIEWELQKENSKRWNPEIQYTSNYYKSNNVEFAVNTEGVYSEPRPIGTRYLTRNL

SEQ ID NO: 603 - DNA, 2208 bp, synthetic construct
  misc_feature 1..2208: note = Adeno Associated Virus Capsid Protein Variant
  source 1..2208: mol_type = other DNA
atggctgccgatggttatcttccagattggctcgaggacaaccttagtgaaggaattcgcgagtggtgggctttgaaacctggagcccctcaacccaaggcaaatcaacaacatcaagacaacgctcgaggtcttgtgcttccgggttacaaataccttggacccggcaacggactcgacaagggggagccggtcaacgcagcagacgcggcggccctcgagcacgacaaggcctacgaccagcagctcaaggccggagacaacccgtacctcaagtacaaccacgccgacgccgagttccaggagcggctcaaagaagatacgtcttttgggggcaacctcgggcgagcagtcttccaggccaaaaagaggcttcttgaacctcttggtctggttgaggaagcggctaagacggctcctggaaagaagaggcctgtagagcagtctcctcaggaaccggactcctccttgggtattggcaaatcgggtgcacagcccgctaaaaagagactcaatttcggtcagactggcgacacagagtcagtcccagaccctcaaccaatcggagaacctcccgcagccccctcaggtgtgggatctcttacaatggcttcaggtggtggcgcaccagtggcagacaataacgaaggtgccgatggagtgggtagttcctcgggaaattggcattgcgattcccaatggctgggggacagagtcatcaccaccagcacccgaacctgggccctgcccacctacaacaatcacctctacaagcaaatctccaacagcacatctggaggatcttcaaatgacaacgcctacttcggctacagcaccccctgggggtattttgacttcaacagattccactgccacttctcaccacgtgactggcagcgactcatcaacaacaactggggattccggcctaagcgactcaacttcaagctcttcaacattcaggtcaaagaggttacggacaacaatggagtcaagaccatcgccaataaccttaccagcacggtccaggtcttcacggactcagactatcagctcccgtacgtgctcgggtcggctcacgagggctgcctcccgccgttcccagcggacgttttcatgattcctcagtacgggtatctgacgcttaatgatggaagccaggccgtgggtcgttcgtccttttactgcctggaatatttcccgtcgcaaatgctaagaacgggtaacaacttccagttcagctacgagtttgagaacgtacctttccatagcagctacgctcacagccaaagcctggaccgactaatgaatccactcatcgaccaatacttgtactatctctcaaagactattaacggttctggacagaatcaacaaacgctaaaattcagtgtggccggacccagcaacatggctgtccagggaagaaactacatacctggacccagctaccgacaacaacgtgtctcaaccactgtgactcaaaacaacaacagcgaatttgcttggcctggagcttcttcttgggctctcaatggacgtaatagcttgatgaatcctggacctgctatggccagccacaaagaaggagaggaccgtttctttcctttgtctggatctttaatttttggcaaacaaggaactggaagagacaacgtggatgcggacaaagtcatgataaccaacgaagaagaaattaaaactactaacccggtagcaacggagtcctatggacaagtggccacaaaccaccagagtgcccgggcacaggcgcagaccggctgggttcaaaaccaaggaatacttccgggtatggtttggcaggacagagatgtgtacctgcaaggacccatttgggccaaaattcctcacacggacggcaactttcacccttctccgctgatgggagggtttggaatgaagcacccgcctcctcagatcctcatcaaaaacacacctgtacctgcggatcctccaacggccttcaacaagggcaagctgaactctttcatcacccagtattctactggccaagtcagcgtggagatcgagtgggagctgcagaaggaaaacagcaagcgctggaacccggagatccagtacacttccaactattacaagtctaataatgttgaatttgctgttaatactgaaggtgtatatagtgaaccccgccccattggcaccagatacctgactcgtaatctg

SEQ ID NO: 604 - protein, 736 aa, synthetic construct
  REGION 1..736: note = Adeno Associated Virus Capsid Protein Variant
MAADGYLPDWLEDNLSEGIREWWALKPGAPQPKANQQHQDNARGLVLPGYKYLGPGNGLDKGEPVNAADAAALEHDKAYDQQLKAGDNPYLKYNHADAEFQERLKEDTSFGGNLGRAVFQAKKRLLEPLGLVEEAAKTAPGKKRPVEQSPQEPDSSLGIGKSGAQPAKKRLNFGQTGDTESVPDPQPIGEPPAAPSGVGSLTMASGGGAPVADNNEGADGVGSSSGNWHCDSQWLGDRVITTSTRTWALPTYNNHLYKQISNSTSGGSSNDNAYFGYSTPWGYFDFNRFHCHFSPRDWQRLINNNWGFRPKRLNFKLFNIQVKEVTDNNGVKTIANNLTSTVQVFTDSDYQLPYVLGSAHEGCLPPFPADVFMIPQYGYLTLNDGSQAVGRSSFYCLEYFPSQMLRTGNNFQFSYEFENVPFHSSYAHSQSLDRLMNPLIDQYLYYLSKTINGSGQNQQTLKFSVAGPSNMAVQGRNYIPGPSYRQQRVSTTVTQNNNSEFAWPGASSWALNGRNSLMNPGPAMASHKEGEDRFFPLSGSLIFGKQGTGRDNVDADKVMITNEEEIKTTNPVATESYGQVATNHQSARAQAQTGWVQNQGILPGMVWQDRDVYLQGPIWAKIPHTDGNFHPSPLMGGFGMKHPPPQILIKNTPVPADPPTAFNKGKLNSFITQYSTGQVSVEIEWELQKENSKRWNPEIQYTSNYYKSNNVEFAVNTEGVYSEPRPIGTRYLTRNL

SEQ ID NO: 605 - DNA, 2208 bp, synthetic construct
  misc_feature 1..2208: note = Adeno Associated Virus Capsid Protein Variant
  source 1..2208: mol_type = other DNA
atggctgccgatggttatcttccagattggctcgaggacaaccttagtgaaggaattcgcgagaggtgggctttgaaacctggagcccctcaacccaaggcaaatcaacaacatcaagacaacgctcgaggtcttgtgcttccgggttacaaataccttggacccggcaacggactcgacaagggggagccggtcaacgcagcagacgcggcggccctcgagcacgacaaggcctacgaccagcagctcaaggccggagacaacccgtacctcaagtacaaccacgccgacgccgagttccaggagcggctcaaagaagatacgtcttttgggggcaacctcgggcgagcagtcttccaggccaaaaagaggcttcttgaacctcttggtctggttgaggaagcggctaagacggctcctggaaagaagaggcctgtagagcagtctcctcaggaaccggactcctccgcgggtattggcaaatcgggtgcacagcccgctaaaaagagactcaatttcggtcagactggcgacacagagtcagtcccagaccctcaaccaatcggagaacctcccgcagccccctcaggtgtgggatctcttacaatggcttcaggtggtggcgcaccagtggcagacaataacgaaggtgccgatggagtgggtagttcctcgggaaattggcattgcgattcccaatggctgggggacagagtcatcaccaccagcacccgaacctgggccctgcccacctacaacaatcacctctacaagcaaatctccaacagcacatctggaggatcttcaaatgacaacgcctacttcggctacagcaccccctgggggtattttgacttcaacagattccactgccacttctcaccacgtgactggcagcgactcatcaacaacaactggggattccggcctaagcgactcaacttcaagctcttcaacattcaggtcaaagaggttacggacaacaatggagtcaagaccatcgccaataaccttaccagcacggtccaggtcttcacggactcagactatcagctcccgtacgtgctcgggtcggctcacgagggctgcctcccgccgttcccagcggacgttttcatgattcctcagtacgggtatctgacgcttaatgatggaagccaggccgtgggtcgttcgtccttttactgcctggaatatttcccgtcgcaaatgctaagaacgggtaacaacttccagttcagctacgagtttgagaacgtacctttccatagcagctacgctcacagccaaagcctggaccgactaatgaatccactcatcgaccaatacttgtactatctctcaaagactattaacggttctggacagaatcaacaaacgctaaaattcagtgtggccggacccagcaacatggctgtccagggaagaaactacatacctggacccagctaccgacaacaacgtgtctcaaccactgtgactcaaaacaacaacagcgaatttgcttggcctggagcttcttcttgggctctcaatggacgtaatagcttgatgaatcctggacctgctatggccagccacaaagaaggagaggaccgtttctttcctttgtctggatctttaatttttggcaaacaaggaactggaagagacaacgtggatgcggacaaagtcatgataaccaacgaagaagaaattaaaactactaacccggtagcaacggagtcctatggacaagtggccacaaaccaccagagtgcccgggcacaggcgcagaccggctgggttcaaaaccaaggaatacttccgggtatggtttggcaggacagagatgtgtacctgcaaggacccatttgggccaaaattcctcacacggacggcaactttcacccttctccgctgatgggagggtttggaatgaagcacccgcctcctcagatcctcatcaaaaacacacctgtacctgcggatcctccaacggccttcaacaagggcaagctgaactctttcatcacccagtattctactggccaagtcagcgtggagatcgagtgggagctgcagaaggaaaacagcaagcgctggaacccggagatccagtacacttccaactattacaagtctaataatgttgaatttgctgttaatactgaaggtgtatatagtgaaccccgccccattggcaccagatacctgactcgtaatctg

SEQ ID NO: 606 - protein, 736 aa, synthetic construct
  REGION 1..736: note = Adeno Associated Virus Capsid Protein Variant
MAADGYLPDWLEDNLSEGIRERWALKPGAPQPKANQQHQDNARGLVLPGYKYLGPGNGLDKGEPVNAADAAALEHDKAYDQQLKAGDNPYLKYNHADAEFQERLKEDTSFGGNLGRAVFQAKKRLLEPLGLVEEAAKTAPGKKRPVEQSPQEPDSSAGIGKSGAQPAKKRLNFGQTGDTESVPDPQPIGEPPAAPSGVGSLTMASGGGAPVADNNEGADGVGSSSGNWHCDSQWLGDRVITTSTRTWALPTYNNHLYKQISNSTSGGSSNDNAYFGYSTPWGYFDFNRFHCHFSPRDWQRLINNNWGFRPKRLNFKLFNIQVKEVTDNNGVKTIANNLTSTVQVFTDSDYQLPYVLGSAHEGCLPPFPADVFMIPQYGYLTLNDGSQAVGRSSFYCLEYFPSQMLRTGNNFQFSYEFENVPFHSSYAHSQSLDRLMNPLIDQYLYYLSKTINGSGQNQQTLKFSVAGPSNMAVQGRNYIPGPSYRQQRVSTTVTQNNNSEFAWPGASSWALNGRNSLMNPGPAMASHKEGEDRFFPLSGSLIFGKQGTGRDNVDADKVMITNEEEIKTTNPVATESYGQVATNHQSARAQAQTGWVQNQGILPGMVWQDRDVYLQGPIWAKIPHTDGNFHPSPLMGGFGMKHPPPQILIKNTPVPADPPTAFNKGKLNSFITQYSTGQVSVEIEWELQKENSKRWNPEIQYTSNYYKSNNVEFAVNTEGVYSEPRPIGTRYLTRNL

SEQ ID NO: 607 - DNA, 2208 bp, synthetic construct
  misc_feature 1..2208: note = Adeno Associated Virus Capsid Protein Variant
  source 1..2208: mol_type = other DNA
atggctgccgatggttatcttccagattggctcgaggacaaccttagtgaaggaattcgcgagtggtgggctttgaaacctggagcccctcaacccaaggcaaatcaacaacatcaagacaacgctcgaggtcttgtgcttccgggttacaaataccttggacccggcaacggactcgacaagggggagccggtcaacgcagcagacgcggcggccctcgagcacgacaaggcctacgaccagcagctcaaggccggagacaacccgtacctcaagtacaaccacgccgacgccgagttccaggagcggctcaaagaagatacgtcttttgggggcaacctcgggcgagcagtcttccaggccaaaaagaggcttcttgaacctcttggtctggttgaggaagcggctaagacggctcctggaaagaagaggcctgtagagcagtctcctcaggaaccggactcctccgcgggtattggcaaatcgggtgcacagcccgctaaaaagagactcaatttcggtgggactggcgacacagagtcagtcccagaccctcaaccaatcggagaacctcccgcagccccctcaggtgtgggatctcttacaatggcttcaggtggtggcgcaccagtggcagacaataacgaaggtgccgatggagtgggtagttcctcgggaaattggcattgcgattcccaatggctgggggacagagtcatcaccaccagcacccgaacctgggccctgcccacctacaacaatcacctctacaagcaaatctccaacagcacatctggaggatcttcaaatgacaacgcctacttcggctacagcaccccctgggggtattttgacttcaacagattccactgccacttctcaccacgtgactggcagcgactcatcaacaacaactggggattccggcctaagcgactcaacttcaagctcttcaacattcaggtcaaagaggttacggacaacaatggagtcaagaccatcgccaataaccttaccagcacggtccaggtcttcacggactcagactatcagctcccgtacgtgctcgggtcggctcacgagggctgcctcccgccgttcccagcggacgttttcatgattcctcagtacgggtatctgacgcttaatgatggaagccaggccgtgggtcgttcgtccttttactgcctggaatatttcccgtcgcaaatgctaagaacgggtaacaacttccagttcagctacgagtttgagaacgtacctttccatagcagctacgctcacagccaaagcctggaccgactaatgaatccactcatcgaccaatacttgtactatctctcaaagactattaacggttctggacagaatcaacaaacgctaaaattcagtgtggccggacccagcaacatggctgtccagggaagaaactacatacctggacccagctaccgacaacaacgtgtctcaaccactgtgactcaaaacaacaacagcgaatttgcttggcctggagcttcttcttgggctctcaatggacgtaatagcttgatgaatcctggacctgctatggccagccacaaagaaggagaggaccgtttctttcctttgtctggatctttaatttttggcaaacaaggaactggaagagacaacgtggatgcggacaaagtcatgataaccaacgaagaagaaattaaaactactaacccggtagcaacggagtcctatggacaagtggccacaaaccaccagagtgcccgggcacaggcgcagaccggctgggttcaaaaccaaggaatacttccgggtatggtttggcaggacagagatgtgtacctgcaaggacccatttgggccaaaattcctcacacggacggcaactttcacccttctccgctgatgggagggtttggaatgaagcacccgcctcctcagatcctcatcaaaaacacacctgtacctgcggatcctccaacggccttcaacaagggcaagctgaactctttcatcacccagtattctactggccaagtcagcgtggagatcgagtgggagctgcagaaggaaaacagcaagcgctggaacccggagatccagtacacttccaactattacaagtctaataatgttgaatttgctgttaatactgaaggtgtatatagtgaaccccgccccattggcaccagatacctgactcgtaatctg

SEQ ID NO: 608 - protein, 736 aa, synthetic construct
  REGION 1..736: note = Adeno Associated Virus Capsid Protein Variant
MAADGYLPDWLEDNLSEGIREWWALKPGAPQPKANQQHQDNARGLVLPGYKYLGPGNGLDKGEPVNAADAAALEHDKAYDQQLKAGDNPYLKYNHADAEFQERLKEDTSFGGNLGRAVFQAKKRLLEPLGLVEEAAKTAPGKKRPVEQSPQEPDSSAGIGKSGAQPAKKRLNFGGTGDTESVPDPQPIGEPPAAPSGVGSLTMASGGGAPVADNNEGADGVGSSSGNWHCDSQWLGDRVITTSTRTWALPTYNNHLYKQISNSTSGGSSNDNAYFGYSTPWGYFDFNRFHCHFSPRDWQRLINNNWGFRPKRLNFKLFNIQVKEVTDNNGVKTIANNLTSTVQVFTDSDYQLPYVLGSAHEGCLPPFPADVFMIPQYGYLTLNDGSQAVGRSSFYCLEYFPSQMLRTGNNFQFSYEFENVPFHSSYAHSQSLDRLMNPLIDQYLYYLSKTINGSGQNQQTLKFSVAGPSNMAVQGRNYIPGPSYRQQRVSTTVTQNNNSEFAWPGASSWALNGRNSLMNPGPAMASHKEGEDRFFPLSGSLIFGKQGTGRDNVDADKVMITNEEEIKTTNPVATESYGQVATNHQSARAQAQTGWVQNQGILPGMVWQDRDVYLQGPIWAKIPHTDGNFHPSPLMGGFGMKHPPPQILIKNTPVPADPPTAFNKGKLNSFITQYSTGQVSVEIEWELQKENSKRWNPEIQYTSNYYKSNNVEFAVNTEGVYSEPRPIGTRYLTRNL

SEQ ID NO: 609 - DNA, 2208 bp, synthetic construct
  misc_feature 1..2208: note = Adeno Associated Virus Capsid Protein Variant
  source 1..2208: mol_type = other DNA
atggctgccgatggttatcttccagattggctcgaggacaaccttagtgaaggaattcgcgagtggtgggctttgaaacctggagcccctcaacccaaggcaaatcaacaacatcaagacaacgctcgaggtcttgtgcttccgggttacaaataccttggacccggcaacggactcgacaagggggagccggtcaacgcagcagacgcggcggccctcgagcacgacaaggcctacgaccagcagctcaaggccggagacaacccgtacctcaagtacaaccacgccgacgccgagttccaggagcggctcaaagaagatacgtcttttgggggcaacctcgggcgagcagtcttccaggccaaaaagaggcttcttgaacctcttggtctggttgaggaagcggctaagacggctcctggaaagaagaggcctgtagagcagtctcctcaggaaccggactcctccgcgggtattggcaaatcgggtgcacagcccgctaaaaagagactcaatttcggtcagactggcgacacagagtcagtcccagaccctcaaccaatcggagaacctcccgcagccccctcaggtgtgggatctcttacaatggcttcaggtggtggcgcaccagtggcagacaataacgaaggtgccgatggagtgggtagttcctcgggaaattggcattgcgattcccaatggctgggggacagagtcatcaccaccagcacccgaacctgggccctgcccacctacaacaatcacctctacaagcaaatctccaacagcacatctggaggatcttcaaatgacaacgcctacttcggctacagcaccccctgggggtattttgacttcaacagattccactgccacttctcaccacgtgactggcagcgactcatcaacaacaactggggattccggcctaagcgactcaacttcaagctcttcaacattcaggtcaaagaggttacggacaacaatggagtcaagaccatcgccaataaccttaccagcacggtccaggtcttcacggactcagactatcagctcccgtacgtgctcgggtcggctcacgagggctgcctcccgccgttcccagcggacgttttcatgattcctcagtacgggtatctgacgcttaatgatggaagccaggccgtgggtcgttcgtccttttactgcctggaatatttcccgtcgcaaatgctaagaacgggtaacaacttccagttcagctacgagtttgagaacgtacctttccatagcagctacgctcacagccaaagcctggaccgactaatgaatccactcatcgaccaatacttgtactatctctcaaagactattaacggttctggacagaatcaacaaacgctaaaattcagtgtggccggacccagcaacatggctgtccagggaagaaactacatacctggacccagctaccgacaacaacgtgtctcaaccactgtgactcaaaacaacaacagcgaatttgcttggcctggagcttcttcttgggctctcaatggacgtaatagcttgatgaatcctggacctgctatggccagccacaaagaaggagaggaccgtttctttcctttgtctggatctttaatttttggcaaacaaggaactggaagagacaacgtggatgcggacaaagtcatgataaccaacgaagaagaaattaaaactactaacccggtagcaacggagtcctatggattggtggccacaaaccaccagagtgcccgggcacaggcgcagaccggctgggttcaaaaccaaggaatacttccgggtatggtttggcaggacagagatgtgtacctgcaaggacccatttgggccaaaattcctcacacggacggcaactttcacccttctccgctgatgggagggtttggaatgaagcacccgcctcctcagatcctcatcaaaaacacacctgtacctgcggatcctccaacggccttcaacaagggcaagctgaactctttcatcacccagtattctactggccaagtcagcgtggagatcgagtgggagctgcagaaggaaaacagcaagcgctggaacccggagatccagtacacttccaactattacaagtctaataatgttgaatttgctgttaatactgaaggtgtatatagtgaaccccgccccattggcaccagatacctgactcgtaatctg

SEQ ID NO: 610 - protein, 736 aa, synthetic construct
  REGION 1..736: note = Adeno Associated Virus Capsid Protein Variant
MAADGYLPDWLEDNLSEGIREWWALKPGAPQPKANQQHQDNARGLVLPGYKYLGPGNGLDKGEPVNAADAAALEHDKAYDQQLKAGDNPYLKYNHADAEFQERLKEDTSFGGNLGRAVFQAKKRLLEPLGLVEEAAKTAPGKKRPVEQSPQEPDSSAGIGKSGAQPAKKRLNFGQTGDTESVPDPQPIGEPPAAPSGVGSLTMASGGGAPVADNNEGADGVGSSSGNWHCDSQWLGDRVITTSTRTWALPTYNNHLYKQISNSTSGGSSNDNAYFGYSTPWGYFDFNRFHCHFSPRDWQRLINNNWGFRPKRLNFKLFNIQVKEVTDNNGVKTIANNLTSTVQVFTDSDYQLPYVLGSAHEGCLPPFPADVFMIPQYGYLTLNDGSQAVGRSSFYCLEYFPSQMLRTGNNFQFSYEFENVPFHSSYAHSQSLDRLMNPLIDQYLYYLSKTINGSGQNQQTLKFSVAGPSNMAVQGRNYIPGPSYRQQRVSTTVTQNNNSEFAWPGASSWALNGRNSLMNPGPAMASHKEGEDRFFPLSGSLIFGKQGTGRDNVDADKVMITNEEEIKTTNPVATESYGLVATNHQSARAQAQTGWVQNQGILPGMVWQDRDVYLQGPIWAKIPHTDGNFHPSPLMGGFGMKHPPPQILIKNTPVPADPPTAFNKGKLNSFITQYSTGQVSVEIEWELQKENSKRWNPEIQYTSNYYKSNNVEFAVNTEGVYSEPRPIGTRYLTRNL

SEQ ID NO: 611 - DNA, 2208 bp, synthetic construct
  misc_feature 1..2208: note = Adeno Associated Virus Capsid Protein Variant
  source 1..2208: mol_type = other DNA
atggctgccgatggttatcttccagattggctcgaggacaaccttagtgaaggaattcgcgagtggtgggctttgaaacctggagcccctcaacccaaggcaaatcaacaacatcaagacaacgctcggggtcttgtgcttccgggttacaaataccttggacccggcaacggactcgacaagggggagccggtcaacgcagcagacgcggcggccctcgagcacgacaaggcctacgaccagcagctcaaggccggagacaacccgtacctcaagtacaaccacgccgacgccgagttccaggagcggctcaaagaagatacgtcttttgggggcaacctcgggcgagcagtcttccaggccaaaaagaggcttcttgaacctcttggtctggttgaggaagcggctaagacggctcctggaaagaagaggcctgtagagcagtctcctcaggaaccggactcctccgcgggtattggcaaatcgggtgcacagcccgctaaaaagagactcaatttcggtcagactggcgacacagagtcagtcccagaccctcaaccaatcggagaacctcccgcagccccctcaggtgtgggatctcttacaatggcttcaggtggtggcgcaccagtggcagacaataacgaaggtgccgatggagtgggtagttcctcgggaaattggcattgcgattcccaatggctgggggacagagtcatcaccaccagcacccgaacctgggccctgcccacctacaacaatcacctctacaagcaaatctccaacagcacatctggaggatcttcaaatgacaacgcctacttcggctacagcaccccctgggggtattttgacttcaacagattccactgccacttctcaccacgtgactggcagcgactcatcaacaacaactggggattccggcctaagcgactcaacttcaagctcttcaacattcaggtcaaagaggttacggacaacaatggagtcaagaccatcgccaataaccttaccagcacggtccaggtcttcacggactcagactatcagctcccgtacgtgctcgggtcggctcacgagggctgcctcccgccgttcccagcggacgttttcatgattcctcagtacgggtatctgacgcttaatgatggaagccaggccgtgggtcgttcgtccttttactgcctggaatatttcccgtcgcaaatgctaagaacgggtaacaacttccagttcagctacgagtttgagaacgtacctttccatagcagctacgctcacagccaaagcctggaccgactaatgaatccactcatcgaccaatacttgtactatctctcaaagactattaacggttctggacagaatcaacaaacgctaaaattcagtgtggccggacccagcaacatggctgtccagggaagaaactacatacctggacccagctaccctcaacaacgtgtctcaaccactgtgactcaaaacaacaacagcgaatttgcttggcctggagcttcttcttgggctctcaatggacgtaatagcttgatgaatcctggacctgctatggccagccacaaagaaggagaggaccgtttctttcctttgtctggatctttaatttttggcaaacaaggaactggaagagacaacgtggatgcggacaaagtcatgataaccaacgaagaagaaattaaaactactaacccggtagcaacggagtcctatggacaagtggccacaaaccaccagagtgcccgggcacaggcgcagaccggctgggttcaaaaccaaggaatacttccgggtatggtttggcaggacagagatgtgtacctgcaaggacccatttgggccaaaattcctcacacggacggcaactttcacccttctccgctgatgggagggtttggaatgaagcacccgcctcctcagatcctcatcaaaaacacacctgtacctgcggatcctccaacggccttcaacaagggcaagctgaactctttcatcacccagtattctactggccaagtcagcgtggagatcgagtgggagctgcagaaggaaaacagcaagcgctggaacccggagatccagtacacttccaactattacaagtctaataatgttgaatttgctgttaatactgaaggtgtatatagtgaaccccgccccattggcaccagatacctgactcgtaatctg

SEQ ID NO: 612 - protein, 736 aa, synthetic construct
  REGION 1..736: note = Adeno Associated Virus Capsid Protein Variant
MAADGYLPDWLEDNLSEGIREWWALKPGAPQPKANQQHQDNARGLVLPGYKYLGPGNGLDKGEPVNAADAAALEHDKAYDQQLKAGDNPYLKYNHADAEFQERLKEDTSFGGNLGRAVFQAKKRLLEPLGLVEEAAKTAPGKKRPVEQSPQEPDSSAGIGKSGAQPAKKRLNFGQTGDTESVPDPQPIGEPPAAPSGVGSLTMASGGGAPVADNNEGADGVGSSSGNWHCDSQWLGDRVITTSTRTWALPTYNNHLYKQISNSTSGGSSNDNAYFGYSTPWGYFDFNRFHCHFSPRDWQRLINNNWGFRPKRLNFKLFNIQVKEVTDNNGVKTIANNLTSTVQVFTDSDYQLPYVLGSAHEGCLPPFPADVFMIPQYGYLTLNDGSQAVGRSSFYCLEYFPSQMLRTGNNFQFSYEFENVPFHSSYAHSQSLDRLMNPLIDQYLYYLSKTINGSGQNQQTLKFSVAGPSNMAVQGRNYIPGPSYPQQRVSTTVTQNNNSEFAWPGASSWALNGRNSLMNPGPAMASHKEGEDRFFPLSGSLIFGKQGTGRDNVDADKVMITNEEEIKTTNPVATESYGQVATNHQSARAQAQTGWVQNQGILPGMVWQDRDVYLQGPIWAKIPHTDGNFHPSPLMGGFGMKHPPPQILIKNTPVPADPPTAFNKGKLNSFITQYSTGQVSVEIEWELQKENSKRWNPEIQYTSNYYKSNNVEFAVNTEGVYSEPRPIGTRYLTRNL

SEQ ID NO: 613 - DNA, 2208 bp, synthetic construct
  misc_feature 1..2208: note = Adeno Associated Virus Capsid Protein Variant
  source 1..2208: mol_type = other DNA
atggctgccgatggttatcttccagattggctcgaggacaaccttagtgaaggaattcgcgagtggtgggctttgaaacctggagcccctcaacccaaggcaaatcaacaacatcaagacaacgctcgaggtcttgtgcttccgggttacaaataccttggacccggcaacggactcgacaagggggagccggtcaacgcagcagacgcggcggccctcgagcacgacaaggcctacgaccagcagctcaaggccggagacaacccgtacctcaagtacaaccacgccgacgccgagttccaggagcggctcaaagaagatacgtcttttgggggcaacctcgggcgagcagtcttccaggccaaaaagaggcttcttgaacctcttggtctggttgaggaagcggctaagacggctcctggaaagaagaggcctgtagagcagtctcctcaggaaccggactcctccgcgggtattggcaaatcgggtgcacagcccgctaaaaagagactcgagttcggtcagactggcgacacagagtcagtcccagaccctcaaccaatcggagaacctcccgcagccccctcaggtgtgggatctcttacaatggcttcaggtggtggcgcaccagtggcagacaataacgaaggtgccgatggagtgggtagttcctcgggaaattggcattgcgattcccaatggctgggggacagagtcatcaccaccagcacccgaacctgggccctgcccacctacaacaatcacctctacaagcaaatctccaacagcacatctggaggatcttcaaatgacaacgcctacttcggctacagcaccccctgggggtattttgacttcaacagattccactgccacttctcaccacgtgactggcagcgactcatcaacaacaactggggattccggcctaagcgactcaacttcaagctcttcaacattcaggtcaaagaggttacggacaacaatggagtcaagaccatcgccaataaccttaccagcacggtccaggtcttcacggactcagactatcagctcccgtacgtgctcgggtcggctcacgagggctgcctcccgccgttcccagcggacgttttcatgattcctcagtacgggtatctgacgcttaatgatggaagccaggccgtgggtcgttcgtccttttactgcctggaatatttcccgtcgcaaatgctaagaacgggtaacaacttccagttcagctacgagtttgagaacgtacctttccatagcagctacgctcacagccaaagcctggaccgactaatgaatccactcatcgaccaatacttgtactatctctcaaagactattaacggttctggacagaatcaacaaacgctaaaattcagtgtggccggacccagcaacatggctgtccagggaagaaactacatacctggacccagctaccgacaacaacgtgtctcaaccactgtgactcaaaacaacaacagcgaatttgcttggcctggagcttcttcttgggctctcaatggacgtaatagcttgatgaatcctggacctgctatggccagccacaaagaaggagaggaccgtttctttcctttgtctggatctttaatttttggcaaacaaggaactggaagagacaacgtggatgcggacaaagtcatgataaccaacgaagaagaaattaaaactactaacccggtagcaacggagtcctatggacaagtggccacaaaccaccagagtgcccgggcacaggcgcagaccggctgggttcaaaaccaaggaatacttccgggtatggtttggcaggacagagatgtgtacctgcaaggacccatttgggccaaaattcctcacacggacggcaactttcacccttctccgctgatgggagggtttggaatgaagcacccgcctcctcagatcctcatcaaaaacacacctgtacctgcggatcctccaacggccttcaacaagggcaagctgaactctttcatcacccagtattctactggccaagtcagcgtggagatcgagtgggagctgcagaaggaaaacagcaagcgctggaacccggagatccagtacacttccaactattacaagtctaataatgttgaatttgctgttaatactgaaggtgtatatagtgaaccccgccccattggcaccagatacctgactcgtaatctg

SEQ ID NO: 614 - protein, 736 aa, synthetic construct
  REGION 1..736: note = Adeno Associated Virus Capsid Protein Variant
MAADGYLPDWLEDNLSEGIREWWALKPGAPQPKANQQHQDNARGLVLPGYKYLGPGNGLDKGEPVNAADAAALEHDKAYDQQLKAGDNPYLKYNHADAEFQERLKEDTSFGGNLGRAVFQAKKRLLEPLGLVEEAAKTAPGKKRPVEQSPQEPDSSAGIGKSGAQPAKKRLEFGQTGDTESVPDPQPIGEPPAAPSGVGSLTMASGGGAPVADNNEGADGVGSSSGNWHCDSQWLGDRVITTSTRTWALPTYNNHLYKQISNSTSGGSSNDNAYFGYSTPWGYFDFNRFHCHFSPRDWQRLINNNWGFRPKRLNFKLFNIQVKEVTDNNGVKTIANNLTSTVQVFTDSDYQLPYVLGSAHEGCLPPFPADVFMIPQYGYLTLNDGSQAVGRSSFYCLEYFPSQMLRTGNNFQFSYEFENVPFHSSYAHSQSLDRLMNPLIDQYLYYLSKTINGSGQNQQTLKFSVAGPSNMAVQGRNYIPGPSYRQQRVSTTVTQNNNSEFAWPGASSWALNGRNSLMNPGPAMASHKEGEDRFFPLSGSLIFGKQGTGRDNVDADKVMITNEEEIKTTNPVATESYGQVATNHQSARAQAQTGWVQNQGILPGMVWQDRDVYLQGPIWAKIPHTDGNFHPSPLMGGFGMKHPPPQILIKNTPVPADPPTAFNKGKLNSFITQYSTGQVSVEIEWELQKENSKRWNPEIQYTSNYYKSNNVEFAVNTEGVYSEPRPIGTRYLTRNL

SEQ ID NO: 615 - DNA, 2208 bp, synthetic construct
  misc_feature 1..2208: note = Adeno Associated Virus Capsid Protein Variant
  source 1..2208: mol_type = other DNA
atggctgccgatggttatcttccagattggctcgaggacaaccttagtgaaggaattcgcgagtggtggtggttgaaacctggagcccctcaacccaaggcaaatcaacaacatcaagacaacgctcgaggtcttgtgcttccgggttacaaataccttggacccggcaacggactcgacaagggggagccggtcaacgcagcagacgcggcggccctcgagcacgacaaggcctacgaccagcagctcaaggccggagacaacccgtacctcaagtacaaccacgccgacgccgagttccaggagcggctcaaagaagatacgtcttttgggggcaacctcgggcgagcagtcttccaggccaaaaagaggcttcttgaacctcttggtctggttgaggaagcggctaagacggctcctggaaagaagaggcctgtagagcagtctcctcaggaaccggactcctccgcgggtattggcaaatcgggtgcacagcccgctaaaaagagactcaatttcggtcagactggcgacacagagtcagtcccagaccctcaaccaatcggagaacctcccgcagccccctcaggtgtgggatctcttacaatggcttcaggtggtggcgcaccagtggcagacaataacgaaggtgccgatggagtgggtagttcctcgggaaattggcattgcgattcccaatggctgggggacagagtcatcaccaccagcacccgaacctgggccctgcccacctacaacaatcacctctacaagcaaatctccaacagcacatctggaggatcttcaaatgacaacgcctacttcggctacagcaccccctgggggtattttgacttcaacagattccactgccacttctcaccacgtgactggcagcgactcatcaacaacaactggggattccggcctaagcgactcaacttcaagctcttcaacattcaggtcaaagaggttacggacaacaatggagtcaagaccatcgccaataaccttaccagcacggtccaggtcttcacggactcagactatcagctcccgtacgtgctcgggtcggctcacgagggctgcctcccgccgttcccagcggacgttttcatgattcctcagtacgggtatctgacgcttaatgatggaagccaggccgtgggtcgttcgtccttttactgcctggaatatttcccgtcgcaaatgctaagaacgggtaacaacttccagttcagctacgagtttgagaacgtacctttccatagcagctacgctcacagccaaagcctggaccgactaatgaatccactcatcgaccaatacttgtactatctctcaaagactattaacggttctggacagaatcaacaaacgctaaaattcagtgtggccggacccagcaacatggctgtccagggaagaaactacatacctggacccagctaccgacaacaacgtgtctcaaccactgtgactcaaaacaacaacagcgaatttgcttggcctggagcttcttcttgggctctcaatggacgtaatagcttgatgaatcctggacctgctatggccagccacaaagaaggagaggaccgtttctttcctttgtctggatctttaatttttggcaaacaaggaactggaagagacaacgtggatgcggacaaagtcatgataaccaacgaagaagaaattaaaactactaacccggtagcaacggagtcctatggacaagtggccacaaaccaccagagtgcccgggcacaggcgcagaccggctgggttcaaaaccaaggaatacttccgggtatggtttggcaggacagagatgtgtacctgcaaggacccatttgggccaaaattcctcacacggacggcaactttcacccttctccgctgatgggagggtttggaatgaagcacccgcctcctcagatcctcatcaaaaacacacctgtacctgcggatcctccaacggccttcaacaagggcaagctgaactctttcatcacccagtattctactggccaagtcagcgtggagatcgagtgggagctgcagaaggaaaacagcaagcgctggaacccggagatccagtacacttccaactattacaagtctaataatgttgaatttgctgttaatactgaaggtgtatatagtgaaccccgccccattggcaccagatacctgactcgtaatctg

SEQ ID NO: 616 - protein, 736 aa, synthetic construct
  REGION 1..736: note = Adeno Associated Virus Capsid Protein Variant
MAADGYLPDWLEDNLSEGIREWWWLKPGAPQPKANQQHQDNARGLVLPGYKYLGPGNGLDKGEPVNAADAAALEHDKAYDQQLKAGDNPYLKYNHADAEFQERLKEDTSFGGNLGRAVFQAKKRLLEPLGLVEEAAKTAPGKKRPVEQSPQEPDSSAGIGKSGAQPAKKRLNFGQTGDTESVPDPQPIGEPPAAPSGVGSLTMASGGGAPVADNNEGADGVGSSSGNWHCDSQWLGDRVITTSTRTWALPTYNNHLYKQISNSTSGGSSNDNAYFGYSTPWGYFDFNRFHCHFSPRDWQRLINNNWGFRPKRLNFKLFNIQVKEVTDNNGVKTIANNLTSTVQVFTDSDYQLPYVLGSAHEGCLPPFPADVFMIPQYGYLTLNDGSQAVGRSSFYCLEYFPSQMLRTGNNFQFSYEFENVPFHSSYAHSQSLDRLMNPLIDQYLYYLSKTINGSGQNQQTLKFSVAGPSNMAVQGRNYIPGPSYRQQRVSTTVTQNNNSEFAWPGASSWALNGRNSLMNPGPAMASHKEGEDRFFPLSGSLIFGKQGTGRDNVDADKVMITNEEEIKTTNPVATESYGQVATNHQSARAQAQTGWVQNQGILPGMVWQDRDVYLQGPIWAKIPHTDGNFHPSPLMGGFGMKHPPPQILIKNTPVPADPPTAFNKGKLNSFITQYSTGQVSVEIEWELQKENSKRWNPEIQYTSNYYKSNNVEFAVNTEGVYSEPRPIGTRYLTRNL

SEQ ID NO: 617 - DNA, 2208 bp, synthetic construct
  misc_feature 1..2208: note = Adeno Associated Virus Capsid Protein Variant
  source 1..2208: mol_type = other DNA
atggctgccgatggttatcttccagattggctcgaggacaaccttagtgaaggaattcgcgagtggtgggctttgaaacctggagcccctcaacccaaggcaaatcaacaacatcaagacaacgctcgaggtcttgtgcttccgggttacaaataccttggacccggcaacggactcgacaagggggagccggtcaacgcagcagacgcggcggccctcgagcacgacaaggcctacgaccagcagctcaaggccggagacaacccgtacctcaagtacaaccacgccgacgccgagttccaggagcggctcaaagaagatacgtcttttgggggcaacctcgggcgagcagtcttccaggccaaaaagaggcttcttgaacctcttggtctggttgaggaagcggctaagacggctcctggaaagaagaggcctgtagagcagtctcctcaggaaccggactcctccgcgggtattggcaaatcgggtgcacagcccgctaaaaagagactcaatttcggtcagactggcgacacagagtcagtcccagaccctcaaccaatcggagaacctcccgcagccccctcaggtgtgggatctcttacaatggcttcaggtggtggcgcaccagtggcagacaataacgaaggtgccgatggagtgggtagttcctcgggaaattggcattgcgattcccaatggctgggggacagagtcatcaccaccagcacccgaacctgggccctgcccacctacaacaatcacctctacaagcaaatctccaacagcacatctggaggatcttcaaatgacaacgcctacttcggctacagcaccccctgggggtattttgacttcaacagattccactgccacttctcaccacgtgactggcagcgactcatcaacaacaactggggattccggcctaagcgactcaacttcaagctcttcaacattcaggtcaaagaggttacggacaacaatggagtcaagaccatcgccaataaccttaccagcacggtccaggtcttcacggactcagactatcagctcccgtacgtgctcgggtcggctcacgagggctgcctcccgccgttcccagcggacgttttcatgattcctcagtacgggtatctgacgcttaatgatggaagccaggccgtgggtcgttcgtccttttactgcctggaatatttcccgtcgcaaatgctaagaacgggtaacaacttccagttcagctacgagtttgagaacgtacctttccatagcagctacgctcacagccaaagcctggaccgactaatgaatccactcatcgaccaatacgtgtactatctctcaaagactattaacggttctggacagaatcaacaaacgctaaaattcagtgtggccggacccagcaacatggctgtccagggaagaaactacatacctggacccagctaccgacaacaacgtgtctcaaccactgtgactcaaaacaacaacagcgaatttgcttggcctggagcttcttcttgggctctcaatggacgtaatagcttgatgaatcctggacctgctatggccagccacaaagaaggagaggaccgtttctttcctttgtctggatctttaatttttggcaaacaaggaactggaagagacaacgtggatgcggacaaagtcatgataaccaacgaagaagaaattaaaactactaacccggtagcaacggagtcctatggacaagtggccacaaaccaccagagtgcccgggcacaggcgcagaccggctgggttcaaaaccaaggaatacttccgggtatggtttggcaggacagagatgtgtacctgcaaggacccatttgggccaaaattcctcacacggacggcaactttcacccttctccgctgatgggagggtttggaatgaagcacccgcctcctcagatcctcatcaaaaacacacctgtacctgcggatcctccaacggccttcaacaagggcaagctgaactctttcatcacccagtattctactggccaagtcagcgtggagatcgagtgggagctgcagaaggaaaacagcaagcgctggaacccggagatccagtacacttccaactattacaagtctaataatgttgaatttgctgttaatactgaaggtgtatatagtgaaccccgccccattggcaccagatacctgactcgtaatctg

SEQ ID NO: 618 - protein, 736 aa, synthetic construct
  REGION 1..736: note = Adeno Associated Virus Capsid Protein Variant
MAADGYLPDWLEDNLSEGIREWWALKPGAPQPKANQQHQDNARGLVLPGYKYLGPGNGLDKGEPVNAADAAALEHDKAYDQQLKAGDNPYLKYNHADAEFQERLKEDTSFGGNLGRAVFQAKKRLLEPLGLVEEAAKTAPGKKRPVEQSPQEPDSSAGIGKSGAQPAKKRLNFGQTGDTESVPDPQPIGEPPAAPSGVGSLTMASGGGAPVADNNEGADGVGSSSGNWHCDSQWLGDRVITTSTRTWALPTYNNHLYKQISNSTSGGSSNDNAYFGYSTPWGYFDFNRFHCHFSPRDWQRLINNNWGFRPKRLNFKLFNIQVKEVTDNNGVKTIANNLTSTVQVFTDSDYQLPYVLGSAHEGCLPPFPADVFMIPQYGYLTLNDGSQAVGRSSFYCLEYFPSQMLRTGNNFQFSYEFENVPFHSSYAHSQSLDRLMNPLIDQYVYYLSKTINGSGQNQQTLKFSVAGPSNMAVQGRNYIPGPSYRQQRVSTTVTQNNNSEFAWPGASSWALNGRNSLMNPGPAMASHKEGEDRFFPLSGSLIFGKQGTGRDNVDADKVMITNEEEIKTTNPVATESYGQVATNHQSARAQAQTGWVQNQGILPGMVWQDRDVYLQGPIWAKIPHTDGNFHPSPLMGGFGMKHPPPQILIKNTPVPADPPTAFNKGKLNSFITQYSTGQVSVEIEWELQKENSKRWNPEIQYTSNYYKSNNVEFAVNTEGVYSEPRPIGTRYLTRNL

SEQ ID NO: 619 - DNA, 2208 bp, synthetic construct
  misc_feature 1..2208: note = Adeno Associated Virus Capsid Protein Variant
  source 1..2208: mol_type = other DNA
atggctgccgatggttatcttccagattggctcgaggacaaccttagtgaaggaattcgcgagtggcgggctttgaaacctggagcccctcaacccaaggcaaatcaacaacatcaagacaacgctcgaggtcttgtgcttccgggttacaaataccttggacccggcaacggactcgacaagggggagccggtcaacgcagcagacgcggcggccctcgagcacgacaaggcctacgaccagcagctcaaggccggagacaacccgtacctcaagtacaaccacgccgacgccgagttccaggagcggctcaaagaagatacgtcttttgggggcaacctcgggcgagcagtcttccaggccaaaaagaggcttcttgaacctcttggtctggttgaggaagcggctaagacggctcctggaaagaagaggcctgtagagcagtctcctcaggaaccggactcctccgcgggtattggcaaatcgggtgcacagcccgctaaaaagagactcaatttcggtcagactggcgacacagagtcagtcccagaccctcaaccaatcggagaacctcccgcagccccctcaggtgtgggatctcttacaatggcttcaggtggtggcgcaccagtggcagacaataacgaaggtgccgatggagtgggtagttcctcgggaaattggcattgcgattcccaatggctgggggacagagtcatcaccaccagcacccgaacctgggccctgcccacctacaacaatcacctctacaagcaaatctccaacagcacatctggaggatcttcaaatgacaacgcctacttcggctacagcaccccctgggggtattttgacttcaacagattccactgccacttctcaccacgtgactggcagcgactcatcaacaacaactggggattccggcctaagcgactcaacttcaagctcttcaacattcaggtcaaagaggttacggacaacaatggagtcaagaccatcgccaataaccttaccagcacggtccaggtcttcacggactcagactatcagctcccgtacgtgctcgggtcggctcacgagggctgcctcccgccgttcccagcggacgttttcatgattcctcagtacgggtatctgacgcttaatgatggaagccaggccgtgggtcgttcgtccttttactgcctggaatatttcccgtcgcaaatgctaagaacgggtaacaacttccagttcagctacgagtttgagaacgtacctttccatagcagctacgctcacagccaaagcctggaccgactaatgaatccactcatcgaccaatacttgtactatctctcaaagactattaacggttctggacagaatcaacaaacgctaaaattcagtgtggccggacccagcaacatggctgtccagggaagaaactacatacctggacccagctaccgacaacaacgtgtctcaaccactgtgactcaaaacaacaacagcgaatttgcttggcctggagcttcttcttgggctctcaatggacgtaatagcttgatgaatcctggacctgctatggccagccacaaagaaggagaggaccgtttctttcctttgtctggatctttaatttttggcaaacaaggaactggaagagacaacgtggatgcggacaaagtcatgataaccaacgaagaagaaattaaaactactaacccggtagcaacggagtcctatggacaagtggccacaaaccaccagagtgcccgggcacaggcgcagaccggctgggttcaaaaccaaggaatacttccgggtatggtttggcaggacagagatgtgtacctgcaaggacccatttgggccaaaattcctcacacggacggcaactttcacccttctccgctgatgggagggtttggaatgaagcacccgcctcctcagatcctcatcaaaaacacacctgtacctgcggatcctccaacggccttcaacaagggcaagctgaactctttcatcacccagtattctactggccaagtcagcgtggagatcgagtgggagctgcagaaggaaaacagcaagcgctggaacccggagatccagtacacttccaactattacaagtctaataatgttgaatttgctgttaatactgaaggtgtatatagtgaaccccgccccattggcaccagatacctgactcgtaatctg

SEQ ID NO: 620 - protein, 736 aa, synthetic construct
  REGION 1..736: note = Adeno Associated Virus Capsid Protein Variant
MAADGYLPDWLEDNLSEGIREWRALKPGAPQPKANQQHQDNARGLVLPGYKYLGPGNGLDKGEPVNAADAAALEHDKAYDQQLKAGDNPYLKYNHADAEFQERLKEDTSFGGNLGRAVFQAKKRLLEPLGLVEEAAKTAPGKKRPVEQSPQEPDSSAGIGKSGAQPAKKRLNFGQTGDTESVPDPQPIGEPPAAPSGVGSLTMASGGGAPVADNNEGADGVGSSSGNWHCDSQWLGDRVITTSTRTWALPTYNNHLYKQISNSTSGGSSNDNAYFGYSTPWGYFDFNRFHCHFSPRDWQRLINNNWGFRPKRLNFKLFNIQVKEVTDNNGVKTIANNLTSTVQVFTDSDYQLPYVLGSAHEGCLPPFPADVFMIPQYGYLTLNDGSQAVGRSSFYCLEYFPSQMLRTGNNFQFSYEFENVPFHSSYAHSQSLDRLMNPLIDQYLYYLSKTINGSGQNQQTLKFSVAGPSNMAVQGRNYIPGPSYRQQRVSTTVTQNNNSEFAWPGASSWALNGRNSLMNPGPAMASHKEGEDRFFPLSGSLIFGKQGTGRDNVDADKVMITNEEEIKTTNPVATESYGQVATNHQSARAQAQTGWVQNQGILPGMVWQDRDVYLQGPIWAKIPHTDGNFHPSPLMGGFGMKHPPPQILIKNTPVPADPPTAFNKGKLNSFITQYSTGQVSVEIEWELQKENSKRWNPEIQYTSNYYKSNNVEFAVNTEGVYSEPRPIGTRYLTRNL

SEQ ID NO: 621 - DNA, 2208 bp, synthetic construct
  misc_feature 1..2208: note = Adeno Associated Virus Capsid Protein Variant
  source 1..2208: mol_type = other DNA
atggctgccgatggttatcttccagattggctcgaggacaaccttagtgaaggaattcgcgagtggtgggctttgaaacctggagcccctcaacccaaggcaaatcaacaacatcaagacaacgctcgaggtcttgtgcttccgggttacaaataccttggacccggcaacggactcgacaagggggagccggtcaacgcagcagacgcggcggccctcgagcacgacaaggcctacgaccagcagctcaaggccggagacaacccgtacctcaagtacaaccacgccgacgccgagttccaggagcggctcaaagaagatacgtcttttgggggcaacctcgggcgagcagtcttccaggccaaaaagaggcttcttgaacctcttggtctggttgaggaagcggctaagacggctcctggaaagaagaggcctgtagagcagtctcctcaggaaccggactcctccgcgggtattggcaaatcgggtgcacagcccgctaaaaagagactcaatttcggtcagactggcgacacagagtcagtcccagaccctcaaccaatcggagaacctcccgcagccccctcaggtgtgggatctcttacaatggcttcaggtggtggcgcaccagtggcagacaataacgaaggtgccgatggagtgggtagttcctcgggaaattggcattgcgattcccaatggctgggggacagagtcatcaccaccagcacccgaacctgggccctgcccacctacaacaatcacctctacaagcaaatctccaacagcacatctggaggatcttcaaatgacaacgcctacttcggctacagcaccccctgggggtattttgacttcaacagattccactgccacttctcaccacgtgactggcagcgactcatcaacaacaactggggattccggcctaagcgactcaacttcaagctcttcaacattcaggtcaaagaggttacggacaacaatggagtcaagaccatcgccaataaccttaccagcacggtccaggtcttcacggactcagactatcagctcccgtacgtgctcgggtcggctcacgagggctgcctcccgccgttcccagcggacgttttcatgattcctcagtacgggtatctgacgcttaatgatggaagccaggccgtgggtcgttcgtccttttactgcctggaatatttcccgtcgcaaatgctaagaacgggtaacaacttccagttcagctacgagtttgagaacgtaaggttccatagcagctacgctcacagccaaagcctggaccgactaatgaatccactcatcgaccaatacttgtactatctctcaaagactattaacggttctggacagaatcaacaaacgctaaaattcagtgtggccggacccagcaacatggctgtccagggaagaaactacatacctggacccagctaccgacaacaacgtgtctcaaccactgtgactcaaaacaacaacagcgaatttgcttggcctggagcttcttcttgggctctcaatggacgtaatagcttgatgaatcctggacctgctatggccagccacaaagaaggagaggaccgtttctttcctttgtctggatctttaatttttggcaaacaaggaactggaagagacaacgtggatgcggacaaagtcatgataaccaacgaagaagaaattaaaactactaacccggtagcaacggagtcctatggacaagtggccacaaaccaccagagtgcccgggcacaggcgcagaccggctgggttcaaaaccaaggaatacttccgggtatggtttggcaggacagagatgtgtacctgcaaggacccatttgggccaaaattcctcacacggacggcaactttcacccttctccgctgatgggagggtttggaatgaagcacccgcctcctcagatcctcatcaaaaacacacctgtacctgcggatcctccaacggccttcaacaagggcaagctgaactctttcatcacccagtattctactggccaagtcagcgtggagatcgagtgggagctgcagaaggaaaacagcaagcgctggaacccggagatccagtacacttccaactattacaagtctaataatgttgaatttgctgttaatactgaaggtgtatatagtgaaccccgccccattggcaccagatacctgactcgtaatctg

SEQ ID NO: 622 - protein, 736 aa, synthetic construct
  REGION 1..736: note = Adeno Associated Virus Capsid Protein Variant
MAADGYLPDWLEDNLSEGIREWWALKPGAPQPKANQQHQDNARGLVLPGYKYLGPGNGLDKGEPVNAADAAALEHDKAYDQQLKAGDNPYLKYNHADAEFQERLKEDTSFGGNLGRAVFQAKKRLLEPLGLVEEAAKTAPGKKRPVEQSPQEPDSSAGIGKSGAQPAKKRLNFGQTGDTESVPDPQPIGEPPAAPSGVGSLTMASGGGAPVADNNEGADGVGSSSGNWHCDSQWLGDRVITTSTRTWALPTYNNHLYKQISNSTSGGSSNDNAYFGYSTPWGYFDFNRFHCHFSPRDWQRLINNNWGFRPKRLNFKLFNIQVKEVTDNNGVKTIANNLTSTVQVFTDSDYQLPYVLGSAHEGCLPPFPADVFMIPQYGYLTLNDGSQAVGRSSFYCLEYFPSQMLRTGNNFQFSYEFENVRFHSSYAHSQSLDRLMNPLIDQYLYYLSKTINGSGQNQQTLKFSVAGPSNMAVQGRNYIPGPSYRQQRVSTTVTQNNNSEFAWPGASSWALNGRNSLMNPGPAMASHKEGEDRFFPLSGSLIFGKQGTGRDNVDADKVMITNEEEIKTTNPVATESYGQVATNHQSARAQAQTGWVQNQGILPGMVWQDRDVYLQGPIWAKIPHTDGNFHPSPLMGGFGMKHPPPQILIKNTPVPADPPTAFNKGKLNSFITQYSTGQVSVEIEWELQKENSKRWNPEIQYTSNYYKSNNVEFAVNTEGVYSEPRPIGTRYLTRNL

SEQ ID NO: 623 - DNA, 2208 bp, synthetic construct
  misc_feature 1..2208: note = Adeno Associated Virus Capsid Protein Variant
  source 1..2208: mol_type = other DNA
atggctgccgatggttatcttccagattggctcgaggacaaccttagtgaaggaattcgcgagtggtgggctttgaaacctggagcccctcaacccaaggcaaatcaacaacatcaagacaacgctcgaggtcttgtgcttccgggttacaaataccttggacccggcaacggactcgacaagggggagccggtcaacgcagcagacgcggcggccctcgagcacgacaaggcctacgaccagcagctcaaggccggagacaacccgtacctcaagtacaaccacgccgacgccgagttccaggagcggctcaaagaagatacgtcttttgggggcaacctcgggcgagcagtcttccaggccaaaaagaggcttcttgaacctcttggtctggttgaggaagcggctaagacggctcctggaaagaagaggcctgtagagcagtctcctcaggaaccggactcctccgcgggtattggcaaatcgggtgcacagcccgctaaaaagagactcaatttcggtcagactggcgacacagagtcagtcccagaccctcaaccaatcggagaacctcccgcagccccctcaggtgtgggatctcttacaatggcttcaggtggtggcgcaccagtggcagacaataacgaaggtgccgatggagtgggtagttcctcgggaaattggcattgcgattcccaatggctgggggacagagtcatcaccaccagcacccgaacctgggccctgcccacctacaacaatcacctctacaagcaaatctccaacagcacatctggaggatcttcaaatgacaacgcctacttcggctacagcaccccctgggggtattttgacttcaacagattccactgccacttctcaccacgtgactggcagcgactcatcaacaacaactggggattccggcctaagcgactcaacttcaagctcttcaacattcaggtcaaagaggttacggacaacaatggagtcaagaccatcgccaataaccttaccagcacggtccaggtcttcacggactcagactatcagctcccgtacgtgctcgggtcggctcacgagggctgcctcccgccgttcccagcggacgttttcatgattcctcagtacgggtatctgacgcttaatgatggaagccaggccgtgggtcgttcgtccttttactgcctggaatatttcccgtcgcaaatgctaagaacgggtaacaacttccagttcagctacgagtttgagaacgtacctttccatagcagctacgctcacagccaaagcctggaccgactaatgaatccactcatcgaccaatacttgtactatctctcaaagactattaacggttctggacagaatcaacgcacgctaaaattcagtgtggccggacccagcaacatggctgtccagggaagaaactacatacctggacccagctaccgacaacaacgtgtctcaaccactgtgactcaaaacaacaacagcgagtttgcttggcctggagcttctaagtgggctctcaatggacgtaatagcttgatgaatcctggacctgctatggccagccacaaagaaggagaggaccgtttcttccctctgtctggatctttaatttttggcaaacaaggaactggaagagacaacgtggatgcggacaaagtcatgataaccaacgaagaagaaattaaaactactaacccggtagcaacggagtcctatggacaagtggccacaaaccaccagagtgcccgggcacaggcgcagaccggctgggttcaaaaccaaggaatacttccgggtatggtttggcaggacagagatgtgtacctgcaaggacccatttgggccaaaattcctcacacggacggcaactttcacccttctccgctgatgggagggtttggaatgaagcacccgcctcctcagatcctcatcaaaaacacacctgtacctgcggatcctccaacggccttccgcaagggcaagacgaactctttcatcacccagtattctactggccaagtcagcgtggagatcgagtgggagctgcagaaggaaaacagcaagcgctggaacccggagatccagtacacttccaactattacaagtctaataatgttgaatttgctgttaatactgaaggtgtatatagtgaaccccgccccattggcaccagatacctgactcgtaatctg

SEQ ID NO: 624 - protein, 736 aa, synthetic construct
  REGION 1..736: note = Adeno Associated Virus Capsid Protein Variant
MAADGYLPDWLEDNLSEGIREWWALKPGAPQPKANQQHQDNARGLVLPGYKYLGPGNGLDKGEPVNAADAAALEHDKAYDQQLKAGDNPYLKYNHADAEFQERLKEDTSFGGNLGRAVFQAKKRLLEPLGLVEEAAKTAPGKKRPVEQSPQEPDSSAGIGKSGAQPAKKRLNFGQTGDTESVPDPQPIGEPPAAPSGVGSLTMASGGGAPVADNNEGADGVGSSSGNWHCDSQWLGDRVITTSTRTWALPTYNNHLYKQISNSTSGGSSNDNAYFGYSTPWGYFDFNRFHCHFSPRDWQRLINNNWGFRPKRLNFKLFNIQVKEVTDNNGVKTIANNLTSTVQVFTDSDYQLPYVLGSAHEGCLPPFPADVFMIPQYGYLTLNDGSQAVGRSSFYCLEYFPSQMLRTGNNFQFSYEFENVPFHSSYAHSQSLDRLMNPLIDQYLYYLSKTINGSGQNQRTLKFSVAGPSNMAVQGRNYIPGPSYRQQRVSTTVTQNNNSEFAWPGASKWALNGRNSLMNPGPAMASHKEGEDRFFPLSGSLIFGKQGTGRDNVDADKVMITNEEEIKTTNPVATESYGQVATNHQSARAQAQTGWVQNQGILPGMVWQDRDVYLQGPIWAKIPHTDGNFHPSPLMGGFGMKHPPPQILIKNTPVPADPPTAFRKGKTNSFITQYSTGQVSVEIEWELQKENSKRWNPEIQYTSNYYKSNNVEFAVNTEGVYSEPRPIGTRYLTRNL

SEQ ID NO: 625 - DNA, 2208 bp, synthetic construct
  misc_feature 1..2208: note = Adeno Associated Virus Capsid Protein Variant
  source 1..2208: mol_type = other DNA
atggctgccgatggttatcttccagattggctcgaggacaaccttagtgaaggaattcgcgagtggtgggctttgaaacctggagcccctcaacccaaggcaaatcaacaacatcaagacaacgctcgaggtcttgtgcttccgggttacaaataccttggacccggcaacggactcgacaagggggagccggtcaacgcagcagacgcggcggccctcgagcacgacaaggcctacgaccagcagctcaaggccggagacaacccgtacctcaagtacaaccacgccgacgccgagttccaggagcggctcaaagaagatacgtcttttgggggcaacctcgggcgagcagtcttccaggccaaaaagaggcttcttgaacctcttggtctggttgaggaagcggctaagacggctcctggaaagaagaggcctgtagagcagtctcctcaggaaccggactcctccgcgggtattggcaaatcgggtgcacagcccgctaaaaagagactcaatttcggtcagactggcgacacagagtcagtcccagaccctcaaccaatcggagaacctcccgcagccccctcaggtgtgggatctcttacaatggcttcaggtggtggcgcaccagtggcagacaataacgaaggtgccgatggagtgggtagttcctcgggaaattggcattgcgattcccaatggctgggggacagagtcatcaccaccagcacccgaacctgggccctgcccacctacaacaatcacctctacaagcaaatctccaacagcacatctggaggatcttcaaatgacaacgcctacttcggctacagcaccccctgggggtattttgacttcaacagattccactgccacttctcaccacgtgactggcagcgactcatcaacaacaactggggattccggcctaagcgactcaacttcaagctcttcaacattcaggtcaaagaggttacggacaacaatggagtcaagaccatcgccaataaccttaccagcacggtccaggtcttcacggactcagactatcagctcccgtacgtgctcgggtcggctcacgagggctgcctcccgccgttcccagcggacgttttcatgattcctcagtacgggtatctgacgcttaatgatggaagccaggccgtgggtcgttcgtccttttactgcctggaatatttcccgtcgcaaatgctaagaacgggtaacaacttccagttcacttacgagtttgagaacgtacctttccatagcagctacgctcacagccaaagcctggaccgactaatgaatccactcatcgaccaatacttgtactatctctcaaagactattaacggttctggacagaatcaacaaacgctaaaattcagtgtggccggacccagcaacatggctgtccagggaagaaactacatacctggacccagctaccgacaacaacgtgtctcaaccactgtgactcaaaacaacaacagcgaatttgcttggcctggagcttcttcttgggctctcaatggacgtaatagcttgatgaatcctggacctgctatggccagccacaaagaaggagaggaccgtttctttcctttgtctggatctttaatttttggcaaacaaggaactggaagagacaacgtggatgcggacaaagtcatgataaccaacgaagaagaaattaaaactactaacccggtagcaacggagtcctatggacaagtggccacaaaccaccagagtgcccgggcacaggcgcagaccggctgggttcaaaaccaaggaatacttccgggtatggtttggcaggacagagatgtgtacctgcaaggacccatttgggccaaaattcctcacacggacggcaactttcacccttctccgctgatgggagggtttggaatgaagcacccgcctcctcagatcctcatcaaaaacacacctgtacctgcggatcctccaacggccttcaacaagggcaagctgaactctttcatcacccagtattctactggccaagtcagcgtggagatcgagtgggagctgcagaaggaaaacagcaagcgctggaacccggagatccagtacacttccaactattacaagtctaataatgttgaatttgctgttaatactgaaggtgtatatagtgaaccccgccccattggcaccagatacctgactcgtaatctg

SEQ ID NO: 626 - protein, 736 aa, synthetic construct
  REGION 1..736: note = Adeno Associated Virus Capsid Protein Variant
MAADGYLPDWLEDNLSEGIREWWALKPGAPQPKANQQHQDNARGLVLPGYKYLGPGNGLDKGEPVNAADAAALEHDKAYDQQLKAGDNPYLKYNHADAEFQERLKEDTSFGGNLGRAVFQAKKRLLEPLGLVEEAAKTAPGKKRPVEQSPQEPDSSAGIGKSGAQPAKKRLNFGQTGDTESVPDPQPIGEPPAAPSGVGSLTMASGGGAPVADNNEGADGVGSSSGNWHCDSQWLGDRVITTSTRTWALPTYNNHLYKQISNSTSGGSSNDNAYFGYSTPWGYFDFNRFHCHFSPRDWQRLINNNWGFRPKRLNFKLFNIQVKEVTDNNGVKTIANNLTSTVQVFTDSDYQLPYVLGSAHEGCLPPFPADVFMIPQYGYLTLNDGSQAVGRSSFYCLEYFPSQMLRTGNNFQFTYEFENVPFHSSYAHSQSLDRLMNPLIDQYLYYLSKTINGSGQNQQTLKFSVAGPSNMAVQGRNYIPGPSYRQQRVSTTVTQNNNSEFAWPGASSWALNGRNSLMNPGPAMASHKEGEDRFFPLSGSLIFGKQGTGRDNVDADKVMITNEEEIKTTNPVATESYGQVATNHQSARAQAQTGWVQNQGILPGMVWQDRDVYLQGPIWAKIPHTDGNFHPSPLMGGFGMKHPPPQILIKNTPVPADPPTAFNKGKLNSFITQYSTGQVSVEIEWELQKENSKRWNPEIQYTSNYYKSNNVEFAVNTEGVYSEPRPIGTRYLTRNL

SEQ ID NO: 627 - DNA, 2208 bp, synthetic construct
  misc_feature 1..2208: note = Adeno Associated Virus Capsid Protein Variant
  source 1..2208: mol_type = other DNA
atggctgccgatggttatcttccagattggctcgaggacaaccttagtacgggaattcgcgagtggtgggctttgaaacctggagcccctcaacccaaggcaaatcaacaacatcaagacaacgctcgaggtcttgtgcttccgggttacaaataccttggacccggcaacggactcgacaagggggagccggtcaacgcagcagacgcggcggccctcgagcacgacaaggcctacgaccagcagctcaaggccggagacaacccgtacctcaagtacaaccacgccgacgccgagttccaggagcggctcaaagaagatacgtcttttgggggcaacctcgggcgagcagtcttccaggccaaaaagaggcttcttgaacctcttggtctggttgaggaagcggctaagacggctcctggaaagaagaggcctgtagagcagtctcctcaggaaccggactcctccgcgggtattggcaaatcgggtgcacagcccgctaaaaagagactcaatttcggtcagactggcgacacagagtcagtcccagaccctcaaccaatcggagaacctcccgcagccccctcaggtgtgggatctcttacaatggcttcaggtggtggcgcaccagtggcagacaataacgaaggtgccgatggagtgggtagttcctcgggaaattggcattgcgattcccaatggctgggggacagagtcatcaccaccagcacccgaacctgggccctgcccacctacaacaatcacctctacaagcaaatctccaacagcacatctggaggatcttcaaatgacaacgcctacttcggctacagcaccccctgggggtattttgacttcaacagattccactgccacttctcaccacgtgactggcagcgactcatcaacaacaactggggattccggcctaagcgactcaacttcaagctcttcaacattcaggtcaaagaggttacggacaacaatggagtcaagaccatcgccaataaccttaccagcacggtccaggtcttcacggactcagactatcagctcccgtacgtgctcgggtcggctcacgagggctgcctcccgccgttcccagcggacgttttcatgattcctcagtacgggtatctgacgcttaatgatggaagccaggccgtgggtcgttcgtccttttactgcctggaatatttcccgtcgcaaatgctaagaacgggtaacaacttccagttcagctacgagtttgagaacgtacctttccatagcagctacgctcacagccaaagcctggaccgactaatgaatccactcatcgaccaatacttgtactatctctcaaagactattaacggttctggacagaatcaacaaacgctaaaattcagtgtggccggacccagcaacatggctgtccagggaagaaactacatacctggacccagctaccgacaacaacgtgtctcaaccactgtgactcaaaacaacaacagcgaatttgcttggcctggagcttcttcttgggctctcaatggacgtaatagcttgatgaatcctggacctgctatggccagccacaaagaaggagaggaccgtttctttcctttgtctggatctttaatttttggcaaacaaggaactggaagagacaacgtggatgcggacaaagtcatgataaccaacgaagaagaaattaaaactactaacccggtagcaacggagtcctatggacaagtggccacaaaccaccagagtgcccgggcacaggcgcagaccggctgggttcaaaaccaaggaatacttccgggtatggtttggcaggacagagatgtgtacctgcaaggacccatttgggccaaaattcctcacacggacggcaactttcacccttctccgctgatgggagggtttggaatgaagcacccgcctcctcagatcctcatcaaaaacacacctgtacctgcggatcctccaacggccttcaacaagggcaagctgaactctttcatcacccagtattctactggccaagtcagcgtggagatcgagtgggagctgcagaaggaaaacagcaagcgctggaacccggagatccagtacacttccaactattacaagtctaataatgttgaatttgctgttaatactgaaggtgtatatagtgaaccccgccccattggcaccagatacctgactcgtaatctg

SEQ ID NO: 628 - protein, 736 aa, synthetic construct
  REGION 1..736: note = Adeno Associated Virus Capsid Protein Variant
MAADGYLPDWLEDNLSTGIREWWALKPGAPQPKANQQHQDNARGLVLPGYKYLGPGNGLDKGEPVNAADAAALEHDKAYDQQLKAGDNPYLKYNHADAEFQERLKEDTSFGGNLGRAVFQAKKRLLEPLGLVEEAAKTAPGKKRPVEQSPQEPDSSAGIGKSGAQPAKKRLNFGQTGDTESVPDPQPIGEPPAAPSGVGSLTMASGGGAPVADNNEGADGVGSSSGNWHCDSQWLGDRVITTSTRTWALPTYNNHLYKQISNSTSGGSSNDNAYFGYSTPWGYFDFNRFHCHFSPRDWQRLINNNWGFRPKRLNFKLFNIQVKEVTDNNGVKTIANNLTSTVQVFTDSDYQLPYVLGSAHEGCLPPFPADVFMIPQYGYLTLNDGSQAVGRSSFYCLEYFPSQMLRTGNNFQFSYEFENVPFHSSYAHSQSLDRLMNPLIDQYLYYLSKTINGSGQNQQTLKFSVAGPSNMAVQGRNYIPGPSYRQQRVSTTVTQNNNSEFAWPGASSWALNGRNSLMNPGPAMASHKEGEDRFFPLSGSLIFGKQGTGRDNVDADKVMITNEEEIKTTNPVATESYGQVATNHQSARAQAQTGWVQNQGILPGMVWQDRDVYLQGPIWAKIPHTDGNFHPSPLMGGFGMKHPPPQILIKNTPVPADPPTAFNKGKLNSFITQYSTGQVSVEIEWELQKENSKRWNPEIQYTSNYYKSNNVEFAVNTEGVYSEPRPIGTRYLTRNL

SEQ ID NO: 629 - DNA, 2208 bp, synthetic construct
  misc_feature 1..2208: note = Adeno Associated Virus Capsid Protein Variant
  source 1..2208: mol_type = other DNA
atggctgccgatggttatcttccagattggctcgaggacaaccttagtgaaggaattcgcgagtggtgggctttgaaacctggagcccctcaacccaaggcaaatcaacaacatcaagacaacgctcgaggtcttgtgcttccgggttacaaataccttggacccggcaacggactcgacaagggggagccggtcaacgcagcagacgcggcggccctcgagcacgacaaggcctacgaccagcagctcaaggccggagacaacccgtacctcaagtacaaccacgccgacgccgagttccaggagcggctcaaagaagatacgtcttttgggggcaacctcgggcgagcagtcttccaggccaaaaagaggcttcttgaacctcttggtctggttgaggaagcggctaagacggctcctggaaagaagaggcctgtagagcagtctcctcaggaaccggactcctccgcgggtattggcaaatcgggtgcacagcccgctaaaaagagactcaatttcggtcagactggcgacacagagtcagtcccagaccctcaaccaatcggagaacctcccgcagccccctcaggtgtgggatctcttacaatggcttcaggtggtggcgcaccagtggcagacaataacgaaggtgccgatggagtgggtagttcctcgggaaattggcattgcgattcccaatggctgggggacagagtcatcaccaccagcacccgaacctgggccctgcccacctacaacaatcacctctacaagcaaatctccaacagcacatctggaggatcttcaaatgacaacgcctacttcggctacagcaccccctgggggtattttgacttcaacagattccactgccacttctcaccacgtgactggcagcgactcatcaacaacaactggggattccggcctaagcgactcaacttcaagctcttcaacattcaggtcaaagaggttacggacaacaatggagtcaagaccatcgccaataaccttaccagcacggtccaggtcttcacggactcagactatcagctcccgtacgtgctcgggtcggctcacgagggctgcctcccgccgttcccagcggacgttttcatgattcctcagtacgggtatctgacgcttaatgatggaagccaggccgtgggtcgttcgtccttttactgcctggaatatttcccgtcgcaaatgctaagaacgggtaacaacttccagttcagctacgagtttgagaacgtacctttccatagcagctacgctcacagccaaagcctggaccgactaatgaatccactcatcgaccaatacttgtactatctctcaaagactattaacggttctggacagaatcaacaaacgctaatgttcagtgtggccggacccagcaacatggctgtccagggaagaaactacatacctggacccagctaccgacaacaacgtgtctcaaccactgtgactcaaaacaacaacagcgaatttgcttggcctggagcttcttcttgggctctcaatggacgtaatagcttgatgaatcctggacctgctatggccagccacaaagaaggagaggaccgtttctttcctttgtctggatctttaatttttggcaaacaaggaactggaagagacaacgtggatgcggacaaagtcatgataaccaacgaagaagaaattaaaactactaacccggtagcaacggagtcctatggacaagtggccacaaaccaccagagtgcccgggcacaggcgcagaccggctgggttcaaaaccaaggaatacttccgggtatggtttggcaggacagagatgtgtacctgcaaggacccatttgggccaaaattcctcacacggacggcaactttcacccttctccgctgatgggagggtttggaatgaagcacccgcctcctcagatcctcatcaaaaacacacctgtacctgcggatcctccaacggccttcaacaagggcaagctgaactctttcatcacccagtattctactggccaagtcagcgtggagatcgagtgggagctgcagaaggaaaacagcaagcgctggaacccggagatccagtacacttccaactattacaagtctaataatgttgaatttgctgttaatactgaaggtgtatatagtgaaccccgccccattggcaccagatacctgactcgtaatctg

SEQ ID NO: 630 - protein, 736 aa, synthetic construct
  REGION 1..736: note = Adeno Associated Virus Capsid Protein Variant
MAADGYLPDWLEDNLSEGIREWWALKPGAPQPKANQQHQDNARGLVLPGYKYLGPGNGLDKGEPVNAADAAALEHDKAYDQQLKAGDNPYLKYNHADAEFQERLKEDTSFGGNLGRAVFQAKKRLLEPLGLVEEAAKTAPGKKRPVEQSPQEPDSSAGIGKSGAQPAKKRLNFGQTGDTESVPDPQPIGEPPAAPSGVGSLTMASGGGAPVADNNEGADGVGSSSGNWHCDSQWLGDRVITTSTRTWALPTYNNHLYKQISNSTSGGSSNDNAYFGYSTPWGYFDFNRFHCHFSPRDWQRLINNNWGFRPKRLNFKLFNIQVKEVTDNNGVKTIANNLTSTVQVFTDSDYQLPYVLGSAHEGCLPPFPADVFMIPQYGYLTLNDGSQAVGRSSFYCLEYFPSQMLRTGNNFQFSYEFENVPFHSSYAHSQSLDRLMNPLIDQYLYYLSKTINGSGQNQQTLMFSVAGPSNMAVQGRNYIPGPSYRQQRVSTTVTQNNNSEFAWPGASSWALNGRNSLMNPGPAMASHKEGEDRFFPLSGSLIFGKQGTGRDNVDADKVMITNEEEIKTTNPVATESYGQVATNHQSARAQAQTGWVQNQGILPGMVWQDRDVYLQGPIWAKIPHTDGNFHPSPLMGGFGMKHPPPQILIKNTPVPADPPTAFNKGKLNSFITQYSTGQVSVEIEWELQKENSKRWNPEIQYTSNYYKSNNVEFAVNTEGVYSEPRPIGTRYLTRNL

SEQ ID NO: 631 - DNA, 2208 bp, synthetic construct
  misc_feature 1..2208: note = Adeno Associated Virus Capsid Protein Variant
  source 1..2208: mol_type = other DNA
atggctgccgatggttatcttccagattggctcgaggacaaccttagtgaaggaattcgcgagtggtgggctttgaaacctggagcccctcaacccaaggcaaatcaacaacatcaagacaacgctcgaggtcttgtgcttccgggttacaaataccttggacccggcaacggactcgacaagggggagccggtcaacgcagcagacgcggcggccctcgagcacgacaaggcctacgaccagcagctcaaggccggagacaacccgtacctcaagtacaaccacgccgacgccgagttccaggagcggctcaaagaagatacgtcttttgggggcaacctcgggcgagcagtcttccaggccaaaaagaggcttcttgaacctcttggtctggttgaggaagcggctaagacggctcctggaaagaagaggcctgtagagcagtctcctcaggaaccggactcctccgcgggtattggcaaatcgggtgcacagcccgctaaaaagagactcaatttcggtcagactggcgacacagagtcagtcccagaccctcaaccaatcggagaacctcccgcagccccctcaggtgtgggatctcttacaatggcttcaggtggtggcgcaccagtggcagacaataacgaaggtgccgatggagtgggtagttcctcgggaaattggcattgcgattcccaatggctgggggacagagtcatcaccaccagcacccgaacctgggccctgcccacctacaacaatcacctctacaagcaaatctccaacagcacatctggaggatcttcaaatgacaacgcctacttcggctacagcaccccctgggggtattttgacttcaacagattccactgccacttctcaccacgtgactggcagcgactcatcaacaacaactggggattccggcctaagcgactcaacttcaagctcttcaacattcaggtcaaagaggttacggacaacaatggagtcaagaccatcgccaataaccttaccagcacggtccaggtcttcacggactcagactatcagctcccgtacgtgctcgggtcggctcacgagggctgcctcccgccgttcccagcggacgttttcatgattcctcagtacgggtatctgacgcttaatgatggaagccaggccgtgggtcgttcgtccttttactgcctggaatatttcccgtcgcaaatgctaagaacgggtaacaacttcaggttcagctacgagtttgagaacgtacctttccatagcagctacgctcacagccaaagcctggaccgactaatgaatccactcatcgaccaatacttgtactatctctcaaagactattaacggttctggacagaatcaacaaacgctaaaattcagtgtggccggacccagcaacatggctgtccagggaagaaactacatacctggacccagctaccgacaacaacgtgtctcaaccactgtgactcaaaacaacaacagcgaatttgcttggcctggagcttcttcttgggctctcaatggacgtaatagcttgatgaatcctggacctgctatggccagccacaaagaaggagaggaccgtttctttcctttgtctggatctttaatttttggcaaacaaggaactggaagagacaacgtggatgcggacaaagtcatgataaccaacgaagaagaaattaaaactactaacccggtagcaacggagtcctatggacaagtggccacaaaccaccagagtgcccgggcacaggcgcagaccggctgggttcaaaaccaaggaatacttccgggtatggtttggcaggacagagatgtgtacctgcaaggacccatttgggccaaaattcctcacacggacggcaactttcacccttctccgctgatgggagggtttggaatgaagcacccgcctcctcagatcctcatcaaaaacacacctgtacctgcggatcctccaacggccttcaacaagggcaagctgaactctttcatcacccagtattctactggccaagtcagcgtggagatcgagtgggagctgcagaaggaaaacagcaagcgctggaacccggagatccagtacacttccaactattacaagtctaataatgttgaatttgctgttaatactgaaggtgtatatagtgaaccccgccccattggcaccagatacctgactcgtaatctg

SEQ ID NO: 632 - protein, 736 aa, synthetic construct
  REGION 1..736: note = Adeno Associated Virus Capsid Protein Variant
MAADGYLPDWLEDNLSEGIREWWALKPGAPQPKANQQHQDNARGLVLPGYKYLGPGNGLDKGEPVNAADAAALEHDKAYDQQLKAGDNPYLKYNHADAEFQERLKEDTSFGGNLGRAVFQAKKRLLEPLGLVEEAAKTAPGKKRPVEQSPQEPDSSAGIGKSGAQPAKKRLNFGQTGDTESVPDPQPIGEPPAAPSGVGSLTMASGGGAPVADNNEGADGVGSSSGNWHCDSQWLGDRVITTSTRTWALPTYNNHLYKQISNSTSGGSSNDNAYFGYSTPWGYFDFNRFHCHFSPRDWQRLINNNWGFRPKRLNFKLFNIQVKEVTDNNGVKTIANNLTSTVQVFTDSDYQLPYVLGSAHEGCLPPFPADVFMIPQYGYLTLNDGSQAVGRSSFYCLEYFPSQMLRTGNNFRFSYEFENVPFHSSYAHSQSLDRLMNPLIDQYLYYLSKTINGSGQNQQTLKFSVAGPSNMAVQGRNYIPGPSYRQQRVSTTVTQNNNSEFAWPGASSWALNGRNSLMNPGPAMASHKEGEDRFFPLSGSLIFGKQGTGRDNVDADKVMITNEEEIKTTNPVATESYGQVATNHQSARAQAQTGWVQNQGILPGMVWQDRDVYLQGPIWAKIPHTDGNFHPSPLMGGFGMKHPPPQILIKNTPVPADPPTAFNKGKLNSFITQYSTGQVSVEIEWELQKENSKRWNPEIQYTSNYYKSNNVEFAVNTEGVYSEPRPIGTRYLTRNL

SEQ ID NO: 633 - DNA, 2208 bp, synthetic construct
  misc_feature 1..2208: note = Adeno Associated Virus Capsid Protein Variant
  source 1..2208: mol_type = other DNA
atggctgccgatggttatcttccagattggctcgaggacaaccttagtgaaggaattcgcgagtggtgggctttgaaacctggagcccctcaacccaaggcaaatcaacaacatcaagacaacgctcgaggtcttgtgcttccgggttacaaataccttggacccggcaacggactcgacaagggggagccggtcaacgcagcagacgcggcggccctcgagcacgacaaggcctacgaccagcagctcaaggccggagacaacccgtacctcaagtacaaccacgccgacgccgagttccaggagcggctcaaagaagatacgtcttttgggggcaacctcgggcgagcagtctcccaggccaaaaagaggcttcttgaacctcttggtctggttgaggaagcggctaagacggctcctggaaagaagaggcctgtagagcagtctcctcaggaaccggactcctccgcgggtattggcaaatcgggtgcacagcccgctaaaaagagactcaatttcggtcagactggcgacacagagtcagtcccagaccctcaaccaatcggagaacctcccgcagccccctcaggtgtgggatctcttacaatggcttcaggtggtggcgcaccagtggcagacaataacgaaggtgccgatggagtgggtagttcctcgggaaattggcattgcgattcccaatggctgggggacagagtcatcaccaccagcacccgaacctgggccctgcccacctacaacaatcacctctacaagcaaatctccaacagcacatctggaggatcttcaaatgacaacgcctacttcggctacagcaccccctgggggtattttgacttcaacagattccactgccacttctcaccacgtgactggcagcgactcatcaacaacaactggggattccggcctaagcgactcaacttcaagctcttcaacattcaggtcaaagaggttacggacaacaatggagtcaagaccatcgccaataaccttaccagcacggtccaggtcttcacggactcagactatcagctcccgtacgtgctcgggtcggctcacgagggctgcctcccgccgttcccagcggacgttttcatgatccctcagtacgggtatctgacgcttaatgatggaagccaggccgtgggtcgttcgtccttttactgcctggaatatttcccgtcgcaaatgctaagaacgggtaacaacttccagttcagctacgagtttgagaacgtacctttccatagcagctacgctcacagccaaagcctggaccgactaatgaatccactcatcgaccaatacttgtactatctctcaaaggggattaacggttctggacagaatcaacaaacgctaaaattcagtgtggccggacccagcaacatggctgtccagggaagaaactacatacctggacccagctaccgacaacaacgtgtctcaaccactgtgactcaaaacaacaacagcgaatttgcttggcctggagcttcttcttgggctctcaatggacgtaatagcttgatgaatcctggacctgctatggccagccacaaagaaggagaggaccgtttctttcctttgtctggatctttaatttttggcaaacaaggaactggaagagacaacgtggatgcggacaaagtcatgataaccaacgaagaagaaattaaaactactaacccggtagcaacggagtcctatggacaagtggccacaaaccaccagagtgcccgggcacaggcgcagaccggctgggttcaaaaccaaggaatacttccgggtatggtttggcaggacagagatgtgtacctgcaaggacccatttgggccaaaattcctcacacggacggcaactttcacccttctccgctgatgggagggtttggaatgaagcacccgcctcctcagatcctcatcaaaaacacacctgtacctgcggatcctccaacggccttcaacaagggcaagctgaactctttcatcacccagtattctactggccaagtcagcgtggagatcgagtgggagctgcagaaggaaaacagcaagcgctggaacccggagatccagtacacttccaactattacaagtctaataatgttgaatttgctgttaatactgaaggtgtatatagtgaaccccgccccattggcaccagatacctgactcgtaatctg

SEQ ID NO: 634 - protein, 736 aa, synthetic construct
  REGION 1..736: note = Adeno Associated Virus Capsid Protein Variant
MAADGYLPDWLEDNLSEGIREWWALKPGAPQPKANQQHQDNARGLVLPGYKYLGPGNGLDKGEPVNAADAAALEHDKAYDQQLKAGDNPYLKYNHADAEFQERLKEDTSFGGNLGRAVSQAKKRLLEPLGLVEEAAKTAPGKKRPVEQSPQEPDSSAGIGKSGAQPAKKRLNFGQTGDTESVPDPQPIGEPPAAPSGVGSLTMASGGGAPVADNNEGADGVGSSSGNWHCDSQWLGDRVITTSTRTWALPTYNNHLYKQISNSTSGGSSNDNAYFGYSTPWGYFDFNRFHCHFSPRDWQRLINNNWGFRPKRLNFKLFNIQVKEVTDNNGVKTIANNLTSTVQVFTDSDYQLPYVLGSAHEGCLPPFPADVFMIPQYGYLTLNDGSQAVGRSSFYCLEYFPSQMLRTGNNFQFSYEFENVPFHSSYAHSQSLDRLMNPLIDQYLYYLSKGINGSGQNQQTLKFSVAGPSNMAVQGRNYIPGPSYRQQRVSTTVTQNNNSEFAWPGASSWALNGRNSLMNPGPAMASHKEGEDRFFPLSGSLIFGKQGTGRDNVDADKVMITNEEEIKTTNPVATESYGQVATNHQSARAQAQTGWVQNQGILPGMVWQDRDVYLQGPIWAKIPHTDGNFHPSPLMGGFGMKHPPPQILIKNTPVPADPPTAFNKGKLNSFITQYSTGQVSVEIEWELQKENSKRWNPEIQYTSNYYKSNNVEFAVNTEGVYSEPRPIGTRYLTRNL

SEQ ID NO: 635 - DNA, 2208 bp, synthetic construct
  misc_feature 1..2208: note = Adeno Associated Virus Capsid Protein Variant
  source 1..2208: mol_type = other DNA
atggctgccgatggttatcttccagattggctcgaggacaaccttagtgaaggaattcgcgagatttgggctttgaaacctggagcccctcaacccaaggcaaatcaacaacatcaagacaacgctcgaggtcttgtgcttccgggttacaaataccttggacccggcaacggactcgacaagggggagccggtcaacgcagcagacgcggcggccctcgagcacgacaaggcctacgaccagcagctcaaggccggagacaacccgtacctcaagtacaaccacgccgacgccgagttccaggagcggctcaaagaagatacgtcttttgggggcaacctcgggcgagcagtcttccaggccaaaaagaggcttcttgaacctcttggtctggttgaggaagcggctaagacggctcctggaaagaagaggcctgtagagcagtctcctcaggaaccggactcctccgcgggtattggcaaatcgggtgcacagcccgctaaaaagagactcaatttcggtcagactggcgacacagagtcagtcccagaccctcaaccaatcggagaacctcccgcagccccctcaggtgtgggatctcttacaatggcttcaggtggtggcgcaccagtggcagacaataacgaaggtgccgatggagtgggtagttcctcgggaaattggcattgcgattcccaatggctgggggacagagtcatcaccaccagcacccgaacctgggccctgcccacctacaacaatcacctctacaagcaaatctccaacagcacatctggaggatcttcaaatgacaacgcctacttcggctacagcaccccctgggggtattttgacttcaacagattccactgccacttctcaccacgtgactggcagcgactcatcaacaacaactggggattccggcctaagcgactcaacttcaagctcttcaacattcaggtcaaagaggttacggacaacaatggagtcaagaccatcgccaataaccttaccagcacggtccaggtcttcacggactcagactatcagctcccgtacgtgctcgggtcggctcacgagggctgcctcccgccgttcccagcggacgttttcatgattcctcagtacgggtatctgacgcttaatgatggaagccaggccgtgggtcgttcgtccttttactgcctggaatatttcccgtcgcaaatgctaagaacgggtaacaacttccagttcagctacgagtttgagaacgtacctttccatagcagctacgctcacagccaaagcctggaccgactaatgaatccactcatcgaccaatacttgtactatctctcaaagactattaacggttctggacagaatcaacaaacgctaaaattcagtgtggccggacccagcaacatggctgtccagggaagaaactacatacctggacccagctaccgacaacaacgtgtctcaaccactgtgactcaaaacaacaacagcgaatttgcttggcctggagcttcttcttgggctctcaatggacgtaatagcttgatgaatcctggacctgctatggccagccacaaagaaggagaggaccgtttctttcctttgtctggatctttaatttttggcaaacaaggaactggaagagacaacgtggatgcggacaaagtcatgataaccaacgaagaagaaattaaaactactaacccggtagcaacggagtcctatggacaagtggccacaaaccaccagagtgcccgggcacaggcgcagaccggctgggttcaaaaccaaggaatacttccgggtatggtttggcaggacagagatgtgtacctgcaaggacccatttgggccaaaattcctcacacggacggcaactttcacccttctccgctgatgggagggtttggaatgaagcacccgcctcctcagatcctcatcaaaaacacacctgtacctgcggatcctccaacggccttcaacaagggcaagctgaactctttcatcacccagtattctactggccaagtcagcgtggagatcgagtgggagctgcagaaggaaaacagcaagcgctggaacccggagatccagtacacttccaactattacaagtctaataatgttgaatttgctgttaatactgaaggtgtatatagtgaaccccgccccattggcaccagatacctgactcgtaatctg

SEQ ID NO: 636 - protein, 736 aa, synthetic construct
  REGION 1..736: note = Adeno Associated Virus Capsid Protein Variant
MAADGYLPDWLEDNLSEGIREIWALKPGAPQPKANQQHQDNARGLVLPGYKYLGPGNGLDKGEPVNAADAAALEHDKAYDQQLKAGDNPYLKYNHADAEFQERLKEDTSFGGNLGRAVFQAKKRLLEPLGLVEEAAKTAPGKKRPVEQSPQEPDSSAGIGKSGAQPAKKRLNFGQTGDTESVPDPQPIGEPPAAPSGVGSLTMASGGGAPVADNNEGADGVGSSSGNWHCDSQWLGDRVITTSTRTWALPTYNNHLYKQISNSTSGGSSNDNAYFGYSTPWGYFDFNRFHCHFSPRDWQRLINNNWGFRPKRLNFKLFNIQVKEVTDNNGVKTIANNLTSTVQVFTDSDYQLPYVLGSAHEGCLPPFPADVFMIPQYGYLTLNDGSQAVGRSSFYCLEYFPSQMLRTGNNFQFSYEFENVPFHSSYAHSQSLDRLMNPLIDQYLYYLSKTINGSGQNQQTLKFSVAGPSNMAVQGRNYIPGPSYRQQRVSTTVTQNNNSEFAWPGASSWALNGRNSLMNPGPAMASHKEGEDRFFPLSGSLIFGKQGTGRDNVDADKVMITNEEEIKTTNPVATESYGQVATNHQSARAQAQTGWVQNQGILPGMVWQDRDVYLQGPIWAKIPHTDGNFHPSPLMGGFGMKHPPPQILIKNTPVPADPPTAFNKGKLNSFITQYSTGQVSVEIEWELQKENSKRWNPEIQYTSNYYKSNNVEFAVNTEGVYSEPRPIGTRYLTRNL

SEQ ID NO: 637 - DNA, 2208 bp, synthetic construct
  misc_feature 1..2208: note = Adeno Associated Virus Capsid Protein Variant
  source 1..2208: mol_type = other DNA
atggctgccgatggttatcttccagattggctcgaggacaaccttagtgaaggaattcgcgagtggtgggctttgaaacctggagcccctcaacccaaggcaaatcaacaacatcaagacaacgctcgaggtcttgtgcttccgggttacaaataccttggacccggcaacggactcgacaagggggagccggtcaacgcagcagacgcggcggccctcgagcacgacaaggcctacgaccagcagctcaaggccggagacaacccgtacctcaagtacaaccacgccgacgccgagttccaggagcggctcaaagaagatacgtcttttgggggcaacctcgggcgagcagtcttccaggccaaaaagaggcttcttgaacctcttggtctggttgaggaagcggctaagacggctcctggaaagaagaggcctgtagagcagtctcctcaggaaccggactcctccgcgggtattggcaaatcgggtgcacagcccgctaaaaagagactcaatttcggtcagactggcgacacagagtcagtcccagaccctcaaccaatcggagaacctcccgcagccccctcaggtgtgggatctcttacaatggcttcaggtggtggcgcaccagtggcagacaataacgaaggtgccgatggagtgggtagttcctcgggaaattggcattgcgattcccaatggctgggggacagagtcatcaccaccagcacccgaacctgggccctgcccacctacaacaatcacctctacaagcaaatctccaacagcacatctggaggatcttcaaatgacaacgcctacttcggctacagcaccccctgggggtattttgacttcaacagattccactgccacttctcaccacgtgactggcagcgactcatcaacaacaactggggattccggcctaagcgactcaacttcaagctcttcaacattcaggtcaaagaggttacggacaacaatggagtcaagaccatcgccaataaccttaccagcacggtccaggtcttcacggactcagactatcagctcccgtacgtgctcgggtcggctcacgagggctgcctcccgccgttcccagcggacgttttcatgattcctcagtacgggtatctgacgcttaatgatggaagccaggccgtgggtcgttcgtccttttactgcctggaatatttcccgtcgcaaatgctaagaacgggtaacaacttccagttcagctacgagtttgagaacgtacctttccatagcagctacgctcacagccaaagcctggaccgactaatgaatccactcatcgaccaatacttgtactatctctcaaagactattaacggttctggacagaatcaacaaacggggaaattcagtgtggccggacccagcaacatggctgtccagggaagaaactacatacctggacccagctaccgacaacaacgtgtctcaaccactgtgactcaaaacaacaacagcgaatttgcttggcctggagcttcttcttgggctctcaatggacgtaatagcttgatgaatcctggacctgctatggccagccacaaagaaggagaggaccgtttctttcctttgtctggatctttaatttttggcaaacaaggaactggaagagacaacgtggatgcggacaaagtcatgataaccaacgaagaagaaattaaaactactaacccggtagcaacggagtcctatggacaagtggccacaaaccaccagagtgcccgggcacaggcgcagaccggctgggttcaaaaccaaggaatacttccgggtatggtttggcaggacagagatgtgtacctgcaaggacccatttgggccaaaattcctcacacggacggcaactttcacccttctccgctgatgggagggtttggaatgaagcacccgcctcctcagatcctcatcaaaaacacacctgtacctgcggatcctccaacggccttcaacaagggcaagctgaactctttcatcacccagtattctactggccaagtcagcgtggagatcgagtgggagctgcagaaggaaaacagcaagcgctggaacccggagatccagtacacttccaactattacaagtctaataatgttgaatttgctgttaatactgaaggtgtatatagtgaaccccgccccattggcaccagatacctgactcgtaatctg

SEQ ID NO: 638 - protein, 736 aa, synthetic construct
  REGION 1..736: note = Adeno Associated Virus Capsid Protein Variant
MAADGYLPDWLEDNLSEGIREWWALKPGAPQPKANQQHQDNARGLVLPGYKYLGPGNGLDKGEPVNAADAAALEHDKAYDQQLKAGDNPYLKYNHADAEFQERLKEDTSFGGNLGRAVFQAKKRLLEPLGLVEEAAKTAPGKKRPVEQSPQEPDSSAGIGKSGAQPAKKRLNFGQTGDTESVPDPQPIGEPPAAPSGVGSLTMASGGGAPVADNNEGADGVGSSSGNWHCDSQWLGDRVITTSTRTWALPTYNNHLYKQISNSTSGGSSNDNAYFGYSTPWGYFDFNRFHCHFSPRDWQRLINNNWGFRPKRLNFKLFNIQVKEVTDNNGVKTIANNLTSTVQVFTDSDYQLPYVLGSAHEGCLPPFPADVFMIPQYGYLTLNDGSQAVGRSSFYCLEYFPSQMLRTGNNFQFSYEFENVPFHSSYAHSQSLDRLMNPLIDQYLYYLSKTINGSGQNQQTGKFSVAGPSNMAVQGRNYIPGPSYRQQRVSTTVTQNNNSEFAWPGASSWALNGRNSLMNPGPAMASHKEGEDRFFPLSGSLIFGKQGTGRDNVDADKVMITNEEEIKTTNPVATESYGQVATNHQSARAQAQTGWVQNQGILPGMVWQDRDVYLQGPIWAKIPHTDGNFHPSPLMGGFGMKHPPPQILIKNTPVPADPPTAFNKGKLNSFITQYSTGQVSVEIEWELQKENSKRWNPEIQYTSNYYKSNNVEFAVNTEGVYSEPRPIGTRYLTRNL

SEQ ID NO: 639 - DNA, 2208 bp, synthetic construct
  misc_feature 1..2208: note = Adeno Associated Virus Capsid Protein Variant
  source 1..2208: mol_type = other DNA
atggctgccgatggttatcttccagattggctcgaggacaaccttagtgaaggaattcgcgagtggtgggctttgaaacctggagcccctcaacccaaggcaaatcaacaacatcaagacaacgctcgaggtcttgtgcttccgggttacaaataccttggacccggcaacggactcgacaagggggagccggtcaacgcagcagacgcggcggccctcgagcacgacaaggcctacgaccagcagctcaaggccggagacaacccgtacctcaagtacaaccacgccgacgccgagttccaggagcggctcaaagaagatacgtcttttgggggcaacctcgggcgagcagtcttccaggccaaaaagaggcttcttgaacctcttggtctggttgaggaagcggctaagacggctcctggaaagaagaggcctgtagagcagtctcctcaggaaccggactcctcccagggtattggcaaatcgggtgcacagcccgctaaaaagagactcaatttcggtcagactggcgacacagagtcagtcccagaccctcaaccaatcggagaacctcccgcagccccctcaggtgtgggatctcttacaatggcttcaggtggtggcgcaccagtggcagacaataacgaaggtgccgatggagtgggtagttcctcgggaaattggcattgcgattcccaatggctgggggacagagtcatcaccaccagcacccgaacctgggccctgcccacctacaacaatcacctctacaagcaaatctccaacagcacatctggaggatcttcaaatgacaacgcctacttcggctacagcaccccctgggggtattttgacttcaacagattccactgccacttctcaccacgtgactggcagcgactcatcaacaacaactggggattccggcctaagcgactcaacttcaagctcttcaacattcaggtcaaagaggttacggacaacaatggagtcaagaccatcgccaataaccttaccagcacggtccaggtcttcacggactcagactatcagctcccgtacgtgctcgggtcggctcacgagggctgcctcccgccgttcccagcggacgttttcatgattcctcagtacgggtatctgacgcttaatgatggaagccaggccgtgggtcgttcgtccttttactgcctggaatatttcccgtcgcaaatgctaagaacgggtaacaacttccagttcagctacgagtttgagaacgtacctttccatagcagctacgctcacagccaaagcctggaccgactaatgaatccactcatcgaccaatacttgtactatctctcaaagactattaacggttctggacagaatcaacaaacgctaaaattcagtgtggccggacccagcaacatggctgtccagggaagaaactacatacctggacccagctaccgacaacaacgtgtctcaaccactgtgactcaaaacaacaacagcgaatttgcttggcctggagcttcttcttgggctctcaatggacgtaatagcttgatgaatcctggacctgctatggccagccacaaagaaggagaggaccgtttctttcctttgtctggatctttaatttttggcaaacaaggaactggaagagacaacgtggatgcggacaaagtcatgataaccaacgaagaagaaattaaaactactaacccggtagcaacggagtcctatggacaagtggccacaaaccaccagagtgcccgggcacaggcgcagaccggctgggttcaaaaccaaggaatacttccgggtatggtttggcaggacagagatgtgtacctgcaaggacccatttgggccaaaattcctcacacggacggcaactttcacccttctccgctgatgggagggtttggaatgaagcacccgcctcctcagatcctcatcaaaaacacacctgtacctgcggatcctccaacggccttcaacaagggcaagctgaactctttcatcacccagtattctactggccaagtcagcgtggagatcgagtgggagctgcagaaggaaaacagcaagcgctggaacccggagatccagtacacttccaactattacaagtctaataatgttgaatttgctgttaatactgaaggtgtatatagtgaaccccgccccattggcaccagatacctgactcgtaatctg

SEQ ID NO: 640 - protein, 736 aa, synthetic construct
  REGION 1..736: note = Adeno Associated Virus Capsid Protein Variant
MAADGYLPDWLEDNLSEGIREWWALKPGAPQPKANQQHQDNARGLVLPGYKYLGPGNGLDKGEPVNAADAAALEHDKAYDQQLKAGDNPYLKYNHADAEFQERLKEDTSFGGNLGRAVFQAKKRLLEPLGLVEEAAKTAPGKKRPVEQSPQEPDSSQGIGKSGAQPAKKRLNFGQTGDTESVPDPQPIGEPPAAPSGVGSLTMASGGGAPVADNNEGADGVGSSSGNWHCDSQWLGDRVITTSTRTWALPTYNNHLYKQISNSTSGGSSNDNAYFGYSTPWGYFDFNRFHCHFSPRDWQRLINNNWGFRPKRLNFKLFNIQVKEVTDNNGVKTIANNLTSTVQVFTDSDYQLPYVLGSAHEGCLPPFPADVFMIPQYGYLTLNDGSQAVGRSSFYCLEYFPSQMLRTGNNFQFSYEFENVPFHSSYAHSQSLDRLMNPLIDQYLYYLSKTINGSGQNQQTLKFSVAGPSNMAVQGRNYIPGPSYRQQRVSTTVTQNNNSEFAWPGASSWALNGRNSLMNPGPAMASHKEGEDRFFPLSGSLIFGKQGTGRDNVDADKVMITNEEEIKTTNPVATESYGQVATNHQSARAQAQTGWVQNQGILPGMVWQDRDVYLQGPIWAKIPHTDGNFHPSPLMGGFGMKHPPPQILIKNTPVPADPPTAFNKGKLNSFITQYSTGQVSVEIEWELQKENSKRWNPEIQYTSNYYKSNNVEFAVNTEGVYSEPRPIGTRYLTRNL

SEQ ID NO: 641 - DNA, 2208 bp, synthetic construct
  misc_feature 1..2208: note = Adeno Associated Virus Capsid Protein Variant
  source 1..2208: mol_type = other DNA
atggctgccgatggttatcttccagattggctcgaggacaaccttagtgaaggaattcgcgagtggtgggctttgaaacctggagcccctcaacccaaggcaaatcaacaacatcaagacaacgctcgaggtcttgtgcttccgggttacaaataccttggacccggcaacggactcgacaagggggagccggtcaacgcagcagacgcggcggccctcgagcacgacaaggcctacgaccagcagctcaaggccggagacaacccgtacctcaagtacaaccacgccgacgccgagttccaggagcggctcaaagaagatacgtcttttgggggcaacctcgggcgagcagtcttccaggccaaaaagaggcttcttgaacctcttggtctggttgaggaagcggctaagacggctcctggaaagaagaggcctgtagagcagtctcctcaggaaccggactcctccgcgggtattggcaaatcgggtgcacagcccgctaaaaagagactcaatttcggtcagactggcgacacagagtcagtcccagaccctcaaccaatcggagaacctcccgcagccccctcaggtgtgggatctcttacaatggcttcaggtggtggcgcaccagtggcagacaataacgaaggtgccgatggagtgggtagttcctcgggaaattggcattgcgattcccaatggctgggggacagagtcatcaccaccagcacccgaacctgggccctgcccacctacaacaatcacctctacaagcaaatctccaacagcacatctggaggatcttcaaatgacaacgcctacttcggctacagcaccccctgggggtattttgacttcaacagattccactgccacttctcaccacgtgactggcagcgactcatcaacaacaactggggattccggcctaagcgactcaacttcaagctcttcaacattcaggtcaaagaggttacggacaacaatggagtcaagaccatcgccaataaccttaccagcacggtccaggtcttcacggactcagactatcagctcccgtacgtgctcgggtcggctcacgagggctgcctcccgccgttcccagcggacgttttcatgattcctcagtacgggtatctgacgcttaatgatggaagccaggccgtgggtctgtcgtccttttactgcctggaatatttcccgtcgcaaatgctaagaacgggtaacaacttccagttcagctacgagtttgagaacgtacctttccatagcagctacgctcacagccaaagcctggaccgactaatgaatccactcatcgaccaatacttgtactatctctcaaagactattaacggttctggacagaatcaacaaacgctaaaattcagtgtggccggacccagcaacatggctgtccagggaagaaactacatacctggacccagctaccgacaacaacgtgtctcaaccactgtgactcaaaacaacaacagcgaatttgcttggcctggagcttcttcttgggctctcaatggacgtaatagcttgatgaatcctggacctgctatggccagccacaaagaaggagaggaccgtttctttcctttgtctggatctttaatttttggcaaacaaggaactggaagagacaacgtggatgcggacaaagtcatgataaccaacgaagaagaaattaaaactactaacccggtagcaacggagtcctatggacaagtggccacaaaccaccagagtgcccgggcacaggcgcagaccggctgggttcaaaaccaaggaatacttccgggtatggtttggcaggacagagatgtgtacctgcaaggacccatttgggccaaaattcctcacacggacggcaactttcacccttctccgctgatgggagggtttggaatgaagcacccgcctcctcagatcctcatcaaaaacacacctgtacctgcggatcctccaacggccttcaacaagggcaagctgaactctttcatcacccagtattctactggccaagtcagcgtggagatcgagtgggagctgcagaaggaaaacagcaagcgctggaacccggagatccagtacacttccaactattacaagtctaataatgttgaatttgctgttaatactgaaggtgtatatagtgaaccccgccccattggcaccagatacctgactcgtaatctg

SEQ ID NO: 642 - protein, 736 aa, synthetic construct
  REGION 1..736: note = Adeno Associated Virus Capsid Protein Variant
MAADGYLPDWLEDNLSEGIREWWALKPGAPQPKANQQHQDNARGLVLPGYKYLGPGNGLDKGEPVNAADAAALEHDKAYDQQLKAGDNPYLKYNHADAEFQERLKEDTSFGGNLGRAVFQAKKRLLEPLGLVEEAAKTAPGKKRPVEQSPQEPDSSAGIGKSGAQPAKKRLNFGQTGDTESVPDPQPIGEPPAAPSGVGSLTMASGGGAPVADNNEGADGVGSSSGNWHCDSQWLGDRVITTSTRTWALPTYNNHLYKQISNSTSGGSSNDNAYFGYSTPWGYFDFNRFHCHFSPRDWQRLINNNWGFRPKRLNFKLFNIQVKEVTDNNGVKTIANNLTSTVQVFTDSDYQLPYVLGSAHEGCLPPFPADVFMIPQYGYLTLNDGSQAVGLSSFYCLEYFPSQMLRTGNNFQFSYEFENVPFHSSYAHSQSLDRLMNPLIDQYLYYLSKTINGSGQNQQTLKFSVAGPSNMAVQGRNYIPGPSYRQQRVSTTVTQNNNSEFAWPGASSWALNGRNSLMNPGPAMASHKEGEDRFFPLSGSLIFGKQGTGRDNVDADKVMITNEEEIKTTNPVATESYGQVATNHQSARAQAQTGWVQNQGILPGMVWQDRDVYLQGPIWAKIPHTDGNFHPSPLMGGFGMKHPPPQILIKNTPVPADPPTAFNKGKLNSFITQYSTGQVSVEIEWELQKENSKRWNPEIQYTSNYYKSNNVEFAVNTEGVYSEPRPIGTRYLTRNL

SEQ ID NO: 643 - DNA, 2208 bp, synthetic construct
  misc_feature 1..2208: note = Adeno Associated Virus Capsid Protein Variant
  source 1..2208: mol_type = other DNA
atggctgccgatggttatcttccagattggctcgaggacaaccttagtgaaggaattcgcgagtggtgggctttgaaacctggagcccctcaacccaaggcaaatcaacaacatcaagacaacgctcgaggtcttgtgcttccgggttacaaataccttggacccggcaacggactcgacaagggggagccggtcaacgcagcagacgcggcggccctcgagcacgacaaggcctacgaccagcagctcaaggccggagacaacccgtacctcaagtacaaccacgccgacgccgagttccaggagcggctcaaagaagatacgtcttttgggggcaacctcgggcgagcagtcttccaggccaaaaagaggcttcttgaacctcttggtctggttgaggaagcggctaagacggctcctggaaagaagaggcctgtagagcagtctcctcaggaaccggactcctccgcgggtattggcaaatcgggtgcacagcccgctaaaaagagactcaatttcggtcagactggcgacacagagtcagtcccagaccctcaaccaatcggagaacctcccgcagccccctcaggtgtgggatctcttacaatggcttcaggtggtggcgcaccagtggcagacaataacgaaggtgccgatggagtgggtagttcctcgggaaattggcattgcgattcccaatggctgggggacagagtcatcaccaccagcacccgaacctgggccctgcccacctacaacaatcacctctacaagcaaatctccaacagcacatctggaggatcttcaaatgacaacgcctacttcggctacagcaccccctgggggtattttgacttcaacagattccactgccacttctcaccacgtgactggcagcgactcatcaacaacaactggggattccggcctaagcgactcaacttcaagctcttcaacattcaggtcaaagaggttacggacaacaatggagtcaagaccatcgccaataaccttaccagcacggtccaggtcttcacggactcagactatcagctcccgtacgtgctcgggtcggctcacgagggctgcctcccgccgttcccagcggacgttttcatgattcctcagtacgggtatctgacgcttaatgatggaagccaggccgtgggtcgttcgtccttttactgcctggaatatttcccgtcgcaaatgctaagaacgggtaacaacttccagttcagctacgagtttgagaacgtacctttccatagcagctacgctcacagccaaagcctggaccgactaatgaatccactcatcgaccaatacttgtactatctctcaaagactattaacggttctggacagaatcaacaaacgctaaaattcagtgtggccggacccagcaacatggctgtccagggaagaaactacatacctggacccagctactggcaacaacgtgtctcaaccactgtgactcaaaacaacaacagcgaatttgcttggcctggagcttcttcttgggctctcaatggacgtaatagcttgatgaatcctggacctgctatggccagccacaaagaaggagaggaccgtttctttcctttgtctggatctttaatttttggcaaacaaggaactggaagagacaacgtggatgcggacaaagtcatgataaccaacgaagaagaaattaaaactactaacccggtagcaacggagtcctatggacaagtggccacaaaccaccagagtgcccgggcacaggcgcagaccggctgggttcaaaaccaaggaatacttccgggtatggtttggcaggacagagatgtgtacctgcaaggacccatttgggccaaaattcctcacacggacggcaactttcacccttctccgctgatgggagggtttggaatgaagcacccgcctcctcagatcctcatcaaaaacacacctgtacctgcggatcctccaacggccttcaacaagggcaagctgaactctttcatcacccagtattctactggccaagtcagcgtggagatcgagtgggagctgcagaaggaaaacagcaagcgctggaacccggagatccagtacacttccaactattacaagtctaataatgttgaatttgctgttaatactgaaggtgtatatagtgaaccccgccccattggcaccagatacctgactcgtaatctg

SEQ ID NO: 644 - protein, 736 aa, synthetic construct
  REGION 1..736: note = Adeno Associated Virus Capsid Protein Variant
MAADGYLPDWLEDNLSEGIREWWALKPGAPQPKANQQHQDNARGLVLPGYKYLGPGNGLDKGEPVNAADAAALEHDKAYDQQLKAGDNPYLKYNHADAEFQERLKEDTSFGGNLGRAVFQAKKRLLEPLGLVEEAAKTAPGKKRPVEQSPQEPDSSAGIGKSGAQPAKKRLNFGQTGDTESVPDPQPIGEPPAAPSGVGSLTMASGGGAPVADNNEGADGVGSSSGNWHCDSQWLGDRVITTSTRTWALPTYNNHLYKQISNSTSGGSSNDNAYFGYSTPWGYFDFNRFHCHFSPRDWQRLINNNWGFRPKRLNFKLFNIQVKEVTDNNGVKTIANNLTSTVQVFTDSDYQLPYVLGSAHEGCLPPFPADVFMIPQYGYLTLNDGSQAVGRSSFYCLEYFPSQMLRTGNNFQFSYEFENVPFHSSYAHSQSLDRLMNPLIDQYLYYLSKTINGSGQNQQTLKFSVAGPSNMAVQGRNYIPGPSYWQQRVSTTVTQNNNSEFAWPGASSWALNGRNSLMNPGPAMASHKEGEDRFFPLSGSLIFGKQGTGRDNVDADKVMITNEEEIKTTNPVATESYGQVATNHQSARAQAQTGWVQNQGILPGMVWQDRDVYLQGPIWAKIPHTDGNFHPSPLMGGFGMKHPPPQILIKNTPVPADPPTAFNKGKLNSFITQYSTGQVSVEIEWELQKENSKRWNPEIQYTSNYYKSNNVEFAVNTEGVYSEPRPIGTRYLTRNL

SEQ ID NO: 645 - DNA, 2208 bp, synthetic construct
  misc_feature 1..2208: note = Adeno Associated Virus Capsid Protein Variant
  source 1..2208: mol_type = other DNA
atggctgccgatggttatcttccagattggctcgaggacaaccttagtgaaggaattcgcgagtggtgggctttgaaacctggagcccctcaacccaaggcaaatcaacaacatcaagacaacgctcgaggtcttgtgcttccgggttacaaataccttggacccggcaacggactcgacaagggggagccggtcaacgcagcagacgcggcggccctcgagcacgacaaggcctacgaccagcagctcaaggccggagacaacccgtacctcaagtacaaccacgccgacgccgagttccaggagcggctcaaagaagatacgtcttttgggggcaacctcgggcgagcagtcttccaggccaaaaagaggcttcttgaacctcttggtctggttgaggaagcggctaagacggctcctggaaacaagaggcctgtagagcagtctcctcaggaaccggactcctccgcgggtattggcaaatcgggtgcacagcccgctaaaaagagactcaatttcggtcagactggcgacacagagtcagtcccagaccctcaaccaatcggagaacctcccgcagccccctcaggtgtgggatctcttacaatggcttcaggtggtggcgcaccagtggcagacaataacgaaggtgccgatggagtgggtagttcctcgggaaattggcattgcgattcccaatggctgggggacagagtcatcaccaccagcacccgaacctgggccctgcccacctacaacaatcacctctacaagcaaatctccaacagcacatctggaggatcttcaaatgacaacgcctacttcggctacagcaccccctgggggtattttgacttcaacagattccactgccacttctcaccacgtgactggcagcgactcatcaacaacaactggggattccggcctaagcgactcaacttcaagctcttcaacattcaggtcaaagaggttacggacaacaatggagtcaagaccatcgccaataaccttaccagcacggtccaggtcttcacggactcagactatcagctcccgtacgtgctcgggtcggctcacgagggctgcctcccgccgttcccagcggacgttttcatgattcctcagtacgggtatctgacgcttaatgatggaagccaggccgtgggtcgttcgtccttttactgcctggaatatttcccgtcgcaaatgctaagaacgggtaacaacttccagttcagctacgagtttgagaacgtacctttccatagcagctacgctcacagccaaagcctggaccgactaatgaatccactcatcgaccaatacttgtactatctctcaaagactattaacggttctggacagaatcaacaaacgctaaaattcagtgtggccggacccagcaacatggctgtccagggaagaaactacatacctggacccagctaccgacaacaacgtgtctcaaccactgtgactcaaaacaacaacagcgagtttgcttggcctggagcttctagttgggctctcaatggacgtaatagcttgatgaatcctggacctgctatggccagccacaaagaaggagaggaccgtttctttcctttgtctggatctttaatttttggcaaacaagggactggaagagacagcgtggatgcggacaaagtcatgataaccaacgaagaagaaattaaaactactaacccggtagcaacggagtcctatggacaagtggccacaaaccaccagtcggcccgggcacaggcgcagaccggctgggttcaaaaccaaggaatacttccgggtatggtttggcaggacagagatgtgtacctgcaaggacccatttgggccaaaattcctcacacggacggcaactttcacccttctccgctgatgggagggtttggaatgaagcacccgcctcctcagatcctcatcaaaaacacacctgtacctgcggatcctccaacggccttcaacaagggcaagctgaactctttcatcacccagtattctactggccaagtcagcgtggagatcgagtgggagctgcagaaggaaaacagcaagcgctggaacccggagatccagtacacttccaactattacaagtctaataatgttgaatttgctgttaatactgaaggtgtatatagtgaaccccgccccattggcaccagatacctgactcgtaatctg

SEQ ID NO: 646 - protein, 736 aa, synthetic construct
  REGION 1..736: note = Adeno Associated Virus Capsid Protein Variant
MAADGYLPDWLEDNLSEGIREWWALKPGAPQPKANQQHQDNARGLVLPGYKYLGPGNGLDKGEPVNAADAAALEHDKAYDQQLKAGDNPYLKYNHADAEFQERLKEDTSFGGNLGRAVFQAKKRLLEPLGLVEEAAKTAPGNKRPVEQSPQEPDSSAGIGKSGAQPAKKRLNFGQTGDTESVPDPQPIGEPPAAPSGVGSLTMASGGGAPVADNNEGADGVGSSSGNWHCDSQWLGDRVITTSTRTWALPTYNNHLYKQISNSTSGGSSNDNAYFGYSTPWGYFDFNRFHCHFSPRDWQRLINNNWGFRPKRLNFKLFNIQVKEVTDNNGVKTIANNLTSTVQVFTDSDYQLPYVLGSAHEGCLPPFPADVFMIPQYGYLTLNDGSQAVGRSSFYCLEYFPSQMLRTGNNFQFSYEFENVPFHSSYAHSQSLDRLMNPLIDQYLYYLSKTINGSGQNQQTLKFSVAGPSNMAVQGRNYIPGPSYRQQRVSTTVTQNNNSEFAWPGASSWALNGRNSLMNPGPAMASHKEGEDRFFPLSGSLIFGKQGTGRDSVDADKVMITNEEEIKTTNPVATESYGQVATNHQSARAQAQTGWVQNQGILPGMVWQDRDVYLQGPIWAKIPHTDGNFHPSPLMGGFGMKHPPPQILIKNTPVPADPPTAFNKGKLNSFITQYSTGQVSVEIEWELQKENSKRWNPEIQYTSNYYKSNNVEFAVNTEGVYSEPRPIGTRYLTRNL

SEQ ID NO: 647 - DNA, 2208 bp, synthetic construct
  misc_feature 1..2208: note = Adeno Associated Virus Capsid Protein Variant
  source 1..2208: mol_type = other DNA
atggctgccgatggttatcttccagattggctcgaggacaaccttagtgaaggaattcgcgagtggtgggctttgaaacctggagcccctcaacccaaggcaaatcaacaacatcaagacaacgctcgaggtcttgtgcttccgggttacaaataccttggacccggcaacggactcgacaagggggagccggtcaacgcagcagacgcggcggccctcgagcacgacaaggcctacgaccagcagctcaaggccggagacaacccgtacctcaagtacaaccacgccgacgccgagttccaggagcggctcaaagaagatacgtcttttgggggcaacctcgggcgagcagtcttccaggccaaaaagaggcttcttgaacctcttggtctggttgaggaagcggctaagacggctcctggaaagaagaggcctgtagagcagtctcctcaggaaccggactcctccgcgggtattggcaaatcgggtgcacagcccgctaaaaagagactcaatactggtcagactggcgacacagagtcagtcccagaccctcaaccaatcggagaacctcccgcagccccctcaggtgtgggatctcttacaatggcttcaggtggtggcgcaccagtggcagacaataacgaaggtgccgatggagtgggtagttcctcgggaaattggcattgcgattcccaatggctgggggacagagtcatcaccaccagcacccgaacctgggccctgcccacctacaacaatcacctctacaagcaaatctccaacagcacatctggaggatcttcaaatgacaacgcctacttcggctacagcaccccctgggggtattttgacttcaacagattccactgccacttctcaccacgtgactggcagcgactcatcaacaacaactggggattccggcctaagcgactcaacttcaagctcttcaacattcaggtcaaagaggttacggacaacaatggagtcaagaccatcgccaataaccttaccagcacggtccaggtcttcacggactcagactatcagctcccgtacgtgctcgggtcggctcacgagggctgcctcccgccgttcccagcggacgttttcatgattcctcagtacgggtatctgacgcttaatgatggaagccaggccgtgggtcgttcgtccttttactgcctggaatatttcccgtcgcaaatgctaagaacgggtaacaacttccagttcagctacgagtttgagaacgtacctttccatagcagctacgctcacagccaaagcctggaccgactaatgaatccactcatcgaccaatacttgtactatctctcaaagactattaacggttctggacagaatcaacaaacgctaaaattcagtgtggccggacccagcaacatggctgtccagggaagaaactacatacctggacccagctaccgacaacaacgtgtctcaaccactgtgactcaaaacaacaacagcgaatttgcttggcctggagcttcttcttgggctctcaatggacgtaatagcttgatgaatcctggacctgctatggccagccacaaagaaggagaggaccgtttctttcctttgtctggatctttaatttttggcaaacaaggaactggaagagacaacgtggatgcggacaaagtcatgataaccaacgaagaagaaattaaaactactaacccggtagcaacggagtcctatggacaagtggccacaaaccaccagagtgcccgggcacaggcgcagaccggctgggttcaaaaccaaggaatacttccgggtatggtttggcaggacagagatgtgtacctgcaaggacccatttgggccaaaattcctcacacggacggcaactttcacccttctccgctgatgggagggtttggaatgaagcacccgcctcctcagatcctcatcaaaaacacacctgtacctgcggatcctccaacggccttcaacaagggcaagctgaactctttcatcacccagtattctactggccaagtcagcgtggagatcgagtgggagctgcagaaggaaaacagcaagcgctggaacccggagatccagtacacttccaactattacaagtctaataatgttgaatttgctgttaatactgaaggtgtatatagtgaaccccgccccattggcaccagatacctgactcgtaatctg

SEQ ID NO: 648 - protein, 736 aa, synthetic construct
  REGION 1..736: note = Adeno Associated Virus Capsid Protein Variant
MAADGYLPDWLEDNLSEGIREWWALKPGAPQPKANQQHQDNARGLVLPGYKYLGPGNGLDKGEPVNAADAAALEHDKAYDQQLKAGDNPYLKYNHADAEFQERLKEDTSFGGNLGRAVFQAKKRLLEPLGLVEEAAKTAPGKKRPVEQSPQEPDSSAGIGKSGAQPAKKRLNTGQTGDTESVPDPQPIGEPPAAPSGVGSLTMASGGGAPVADNNEGADGVGSSSGNWHCDSQWLGDRVITTSTRTWALPTYNNHLYKQISNSTSGGSSNDNAYFGYSTPWGYFDFNRFHCHFSPRDWQRLINNNWGFRPKRLNFKLFNIQVKEVTDNNGVKTIANNLTSTVQVFTDSDYQLPYVLGSAHEGCLPPFPADVFMIPQYGYLTLNDGSQAVGRSSFYCLEYFPSQMLRTGNNFQFSYEFENVPFHSSYAHSQSLDRLMNPLIDQYLYYLSKTINGSGQNQQTLKFSVAGPSNMAVQGRNYIPGPSYRQQRVSTTVTQNNNSEFAWPGASSWALNGRNSLMNPGPAMASHKEGEDRFFPLSGSLIFGKQGTGRDNVDADKVMITNEEEIKTTNPVATESYGQVATNHQSARAQAQTGWVQNQGILPGMVWQDRDVYLQGPIWAKIPHTDGNFHPSPLMGGFGMKHPPPQILIKNTPVPADPPTAFNKGKLNSFITQYSTGQVSVEIEWELQKENSKRWNPEIQYTSNYYKSNNVEFAVNTEGVYSEPRPIGTRYLTRNL

SEQ ID NO: 649 - DNA, 2208 bp, synthetic construct
  misc_feature 1..2208: note = Adeno Associated Virus Capsid Protein Variant
  source 1..2208: mol_type = other DNA
atggctgccgatggttatcttccagattggctcgaggacaaccttagtgaaggaattcgcgagtggtgggctttgaaacctggagcccctcaacccaaggcaaatcaacaacatcaagacaacgctcgaggtcttgtgcttccgggttacaaataccttggacccggcaacggactcgacaagggggagccggtcaacgcagcagacgcggcggccctcgagcacgacaaggcctacgaccagcagctcaaggccggagacaacccgtacctcaagtacaaccacgccgacgccgagttccaggagcggctcaaagaagatacgtcttttgggggcaacctcgggcgagcagtcttccaggccaaaaagaggcttcttgaacctcttggtctggttgaggaagcggctaagacggctcctggaaagaagaggcctgtagagcagtctcctcaggaaccggactcctccgcgggtattggcaaatcgggtgcacagcccgctaaaaagagactcaatttcggtcagactggcgacacagagtcagtcccagaccctcaaccaatcggagaacctcccgcagccccctcaggtgtgggatctcttacaatggcttcaggtggtggcgcaccagtggcagacaataacgaaggtgccgatggagtgggtagttcctcgggaaattggcattgcgattcccaatggctgggggacagagtcatcaccaccagcacccgaacctgggccctgcccacctacaacaatcacctctacaagcaaatctccaacagcacatctggaggatcttcaaatgacaacgcctacttcggctacagcaccccctgggggtattttgacttcaacagattccactgccacttctcaccacgtgactggcagcgactcatcaacaacaactggggattccggcctaagcgactcaacttcaagctcttcaacattcaggtcaaagaggttacggacaacaatggagtcaagaccatcgccaataaccttaccagcacggtccaggtcttcacggactcagactatcagctcccgtacgtgctcgggtcggctcacgagggctgcctcccgccgttcccagcggacgttttcatgattcctcagtacgggtatctgacgcttaatgatggaagccaggccgtgggtcgttcgtccttttactgcctggaatatttcccgtcgcaaatgctaagaacgggtaacaacttccagttcagctacgagtttgagaacgtacctttccatagcagctacgctcacagccaaagcctggaccgactaatgaatccactcgcggaccaatacttgtactatctctcaaagactattaacggttctggacagaatcaacaaacgctaaaattcagtgtggccggacccagcaacatggctgtccagggaagaaactacatacctggacccagctaccgacaacaacgtgtctcaaccactgtgactcaaaacaacaacagcgaatttgcttggcctggagcttcttcttgggctctcaatggacgtaatagcttgatgaatcctggacctgctatggccagccacaaagaaggagaggaccgtttctttcctttgtctggatctttaatttttggcaaacaaggaactggaagagacaacgtggatgcggacaaagtcatgataaccaacgaagaagaaattaaaactactaacccggtagcaacggagtcctatggacaagtggccacaaaccaccagagtgcccgggcacaggcgcagaccggctgggttcaaaaccaaggaatacttccgggtatggtttggcaggacagagatgtgtacctgcaaggacccatttgggccaaaattcctcacacggacggcaactttcacccttctccgctgatgggagggtttggaatgaagcacccgcctcctcagatcctcatcaaaaacacacctgtacctgcggatcctccaacggccttcaacaagggcaagctgaactctttcatcacccagtattctactggccaagtcagcgtggagatcgagtgggagctgcagaaggaaaacagcaagcgctggaacccggagatccagtacacttccaactattacaagtctaataatgttgaatttgctgttaatactgaaggtgtatatagtgaaccccgccccattggcaccagatacctgactcgtaatctg

SEQ ID NO: 650 - protein, 736 aa, synthetic construct
  REGION 1..736: note = Adeno Associated Virus Capsid Protein Variant
MAADGYLPDWLEDNLSEGIREWWALKPGAPQPKANQQHQDNARGLVLPGYKYLGPGNGLDKGEPVNAADAAALEHDKAYDQQLKAGDNPYLKYNHADAEFQERLKEDTSFGGNLGRAVFQAKKRLLEPLGLVEEAAKTAPGKKRPVEQSPQEPDSSAGIGKSGAQPAKKRLNFGQTGDTESVPDPQPIGEPPAAPSGVGSLTMASGGGAPVADNNEGADGVGSSSGNWHCDSQWLGDRVITTSTRTWALPTYNNHLYKQISNSTSGGSSNDNAYFGYSTPWGYFDFNRFHCHFSPRDWQRLINNNWGFRPKRLNFKLFNIQVKEVTDNNGVKTIANNLTSTVQVFTDSDYQLPYVLGSAHEGCLPPFPADVFMIPQYGYLTLNDGSQAVGRSSFYCLEYFPSQMLRTGNNFQFSYEFENVPFHSSYAHSQSLDRLMNPLADQYLYYLSKTINGSGQNQQTLKFSVAGPSNMAVQGRNYIPGPSYRQQRVSTTVTQNNNSEFAWPGASSWALNGRNSLMNPGPAMASHKEGEDRFFPLSGSLIFGKQGTGRDNVDADKVMITNEEEIKTTNPVATESYGQVATNHQSARAQAQTGWVQNQGILPGMVWQDRDVYLQGPIWAKIPHTDGNFHPSPLMGGFGMKHPPPQILIKNTPVPADPPTAFNKGKLNSFITQYSTGQVSVEIEWELQKENSKRWNPEIQYTSNYYKSNNVEFAVNTEGVYSEPRPIGTRYLTRNL

SEQ ID NO: 651 - DNA, 2208 bp, synthetic construct
  misc_feature 1..2208: note = Adeno Associated Virus Capsid Protein Variant
  source 1..2208: mol_type = other DNA
atggctgccgatggttatcttccagattggctcgaggacaaccttagtgaaggaattcgcgagtggtgggctttgaaacctggagcccctcaacccaaggcaaatcaacaacatcaagacaacgctcgaggtcttgtgcttccgggttacaaataccttggacccggcaacggactcgacaagggggagccggtcaacgcagcagacgcggcggccctcgagcacgacaaggcctacgaccagcagctcaaggccggagacaacccgtacctcaagtacaaccacgccgacgccgagttccaggagcggctcaaagaagatacgtcttttgggggcaacctcgggcgagcagtcttccaggccaaaaagaggcttcttgaacctcttggtctggttgaggaagcggctaagacggctcctggaaagaagaggcctgtagagcagtctcctcaggaaccggactcctccgcgggtattggcaaatcgggtgcacagcccgctaaaaagagactcaatttcggtcagactggcgacacagagtcagtcccagaccctcaaccaatcggagaacctcccgcagccccctcaggtgtgggatctcttacaatggcttcaggtggtggcgcaccagtggcagacaataacgaaggtgccgatggagtgggtagttcctcgggaaattggcattgcgattcccaatggctgggggacagagtcatcaccaccagcacccgaacctgggccctgcccacctacaacaatcacctctacaagcaaatctccaacagcacatctggaggatcttcaaatgacaacgcctacttcggctacagcaccccctgggggtattttgacttcaacagattccactgccacttctcaccacgtgactggcagcgactcatcaacaacaactggggattccggcctaagcgactcaacttcaagctcttcaacattcaggtcaaagaggttacggacaacaatggagtcaagaccatcgccaataaccttaccagcacggtccaggtcttcacggactcagactatcagctcccgtacgtgctcgggtcggctcacgagggctgcctcccgccgttcccagcggacgttttcatgattcctcagtacgggtatctgacgcttaatgatggaagcggggccgtgggtcgttcgtccttttactgcctggaatatttcccgtcgcaaatgctaagaacgggtaacaacttccagttcagctacgagtttgagaacgtacctttccatagcagctacgctcacagccaaagcctggaccgactaatgaatccactcatcgaccaatacttgtactatctctcaaagactattaacggttctggacagaatcaacaaacgctaaaattcagtgtggccggacccagcaacatggctgtccagggaagaaactacatacctggacccagctaccgacaacaacgtgtctcaaccactgtgactcaaaacaacaacagcgaatttgcttggcctggagcttcttcttgggctctcaatggacgtaatagcttgatgaatcctggacctgctatggccagccacaaagaaggagaggaccgtttctttcctttgtctggatctttaatttttggcaaacaaggaactggaagagacaacgtggatgcggacaaagtcatgataaccaacgaagaagaaattaaaactactaacccggtagcaacggagtcctatggacaagtggccacaaaccaccagagtgcccgggcacaggcgcagaccggctgggttcaaaaccaaggaatacttccgggtatggtttggcaggacagagatgtgtacctgcaaggacccatttgggccaaaattcctcacacggacggcaactttcacccttctccgctgatgggagggtttggaatgaagcacccgcctcctcagatcctcatcaaaaacacacctgtacctgcggatcctccaacggccttcaacaagggcaagctgaactctttcatcacccagtattctactggccaagtcagcgtggagatcgagtgggagctgcagaaggaaaacagcaagcgctggaacccggagatccagtacacttccaactattacaagtctaataatgttgaatttgctgttaatactgaaggtgtatatagtgaaccccgccccattggcaccagatacctgactcgtaatctg

SEQ ID NO: 652 - protein, 736 aa, synthetic construct
  REGION 1..736: note = Adeno Associated Virus Capsid Protein Variant
MAADGYLPDWLEDNLSEGIREWWALKPGAPQPKANQQHQDNARGLVLPGYKYLGPGNGLDKGEPVNAADAAALEHDKAYDQQLKAGDNPYLKYNHADAEFQERLKEDTSFGGNLGRAVFQAKKRLLEPLGLVEEAAKTAPGKKRPVEQSPQEPDSSAGIGKSGAQPAKKRLNFGQTGDTESVPDPQPIGEPPAAPSGVGSLTMASGGGAPVADNNEGADGVGSSSGNWHCDSQWLGDRVITTSTRTWALPTYNNHLYKQISNSTSGGSSNDNAYFGYSTPWGYFDFNRFHCHFSPRDWQRLINNNWGFRPKRLNFKLFNIQVKEVTDNNGVKTIANNLTSTVQVFTDSDYQLPYVLGSAHEGCLPPFPADVFMIPQYGYLTLNDGSGAVGRSSFYCLEYFPSQMLRTGNNFQFSYEFENVPFHSSYAHSQSLDRLMNPLIDQYLYYLSKTINGSGQNQQTLKFSVAGPSNMAVQGRNYIPGPSYRQQRVSTTVTQNNNSEFAWPGASSWALNGRNSLMNPGPAMASHKEGEDRFFPLSGSLIFGKQGTGRDNVDADKVMITNEEEIKTTNPVATESYGQVATNHQSARAQAQTGWVQNQGILPGMVWQDRDVYLQGPIWAKIPHTDGNFHPSPLMGGFGMKHPPPQILIKNTPVPADPPTAFNKGKLNSFITQYSTGQVSVEIEWELQKENSKRWNPEIQYTSNYYKSNNVEFAVNTEGVYSEPRPIGTRYLTRNL

SEQ ID NO: 653 - DNA, 2208 bp, synthetic construct
  misc_feature 1..2208: note = Adeno Associated Virus Capsid Protein Variant
  source 1..2208: mol_type = other DNA
atggctgccgatggttatcttccagattggctcgaggacaaccttagtgaaggaattcgcgagtggtgggctttgaaacctggagcccctcaacccaaggcaaatcaacaacatcaagacaacgctcgaggtcttgtgcttccgggttacaaataccttggacccggcaacggactcgacaagggggagccggtcaacgcagcagacgcggcggccctcgagcacgacaaggcctacgaccagcagctcaaggccggagacaacccgtacctcaagtacaaccacgccgacgccgagttccaggagcggctcaaagaagatacgtcttttgggggcaacctcgggcgagcagtcttccaggccaaaaagaggcttcttgaacctcttggtctggttgaggaagcggctaagacggctcctggaaagaagaggcctgtagagcagtctcctcaggaaccggactcctccgcgggttgtggcaaatcgggtgcacagcccgctaaaaagagactcaatttcggtcagactggcgacacagagtcagtcccagaccctcaaccaatcggagaacctcccgcagccccctcaggtgtgggatctcttacaatggcttcaggtggtggcgcaccagtggcagacaataacgaaggtgccgatggagtgggtagttcctcgggaaattggcattgcgattcccaatggctgggggacagagtcatcaccaccagcacccgaacctgggccctgcccacctacaacaatcacctctacaagcaaatctccaacagcacatctggaggatcttcaaatgacaacgcctacttcggctacagcaccccctgggggtattttgacttcaacagattccactgccacttctcaccacgtgactggcagcgactcatcaacaacaactggggattccggcctaagcgactcaacttcaagctcttcaacattcaggtcaaagaggttacggacaacaatggagtcaagaccatcgccaataaccttaccagcacggtccaggtcttcacggactcagactatcagctcccgtacgtgctcgggtcggctcacgagggctgcctcccgccgttcccagcggacgttttcatgattcctcagtacgggtatctgacgcttaatgatggaagccaggccgtgggtcgttcgtccttttactgcctggaatatttcccgtcgcaaatgctaagaacgggtaacaacttccagttcagctacgagtttgagaacgtacctttccatagcagctacgctcacagccaaagcctggaccgactaatgaatccactcatcgaccaatacttgtactatctctcaaagactattaacggttctggacagaatcaacaaacgctaaaattcagtgtggccggacccagcaacatggctgtccagggaagaaactacatacctggacccagctaccgacaacaacgtgtctcaaccactgtgactcaaaacaacaacagcgaatttgcttggcctggagcttcttcttgggctctcaatggacgtaatagcttgatgaatcctggacctgctatggccagccacaaagaaggagaggaccgtttctttcctttgtctggatctttaatttttggcaaacaaggaactggaagagacaacgtggatgcggacaaagtcatgataaccaacgaagaagaaattaaaactactaacccggtagcaacggagtcctatggacaagtggccacaaaccaccagagtgcccgggcacaggcgcagaccggctgggttcaaaaccaaggaatacttccgggtatggtttggcaggacagagatgtgtacctgcaaggacccatttgggccaaaattcctcacacggacggcaactttcacccttctccgctgatgggagggtttggaatgaagcacccgcctcctcagatcctcatcaaaaacacacctgtacctgcggatcctccaacggccttcaacaagggcaagctgaactctttcatcacccagtattctactggccaagtcagcgtggagatcgagtgggagctgcagaaggaaaacagcaagcgctggaacccggagatccagtacacttccaactattacaagtctaataatgttgaatttgctgttaatactgaaggtgtatatagtgaaccccgccccattggcaccagatacctgactcgtaatctg

SEQ ID NO: 654 - protein, 736 aa, synthetic construct
  REGION 1..736: note = Adeno Associated Virus Capsid Protein Variant
MAADGYLPDWLEDNLSEGIREWWALKPGAPQPKANQQHQDNARGLVLPGYKYLGPGNGLDKGEPVNAADAAALEHDKAYDQQLKAGDNPYLKYNHADAEFQERLKEDTSFGGNLGRAVFQAKKRLLEPLGLVEEAAKTAPGKKRPVEQSPQEPDSSAGCGKSGAQPAKKRLNFGQTGDTESVPDPQPIGEPPAAPSGVGSLTMASGGGAPVADNNEGADGVGSSSGNWHCDSQWLGDRVITTSTRTWALPTYNNHLYKQISNSTSGGSSNDNAYFGYSTPWGYFDFNRFHCHFSPRDWQRLINNNWGFRPKRLNFKLFNIQVKEVTDNNGVKTIANNLTSTVQVFTDSDYQLPYVLGSAHEGCLPPFPADVFMIPQYGYLTLNDGSQAVGRSSFYCLEYFPSQMLRTGNNFQFSYEFENVPFHSSYAHSQSLDRLMNPLIDQYLYYLSKTINGSGQNQQTLKFSVAGPSNMAVQGRNYIPGPSYRQQRVSTTVTQNNNSEFAWPGASSWALNGRNSLMNPGPAMASHKEGEDRFFPLSGSLIFGKQGTGRDNVDADKVMITNEEEIKTTNPVATESYGQVATNHQSARAQAQTGWVQNQGILPGMVWQDRDVYLQGPIWAKIPHTDGNFHPSPLMGGFGMKHPPPQILIKNTPVPADPPTAFNKGKLNSFITQYSTGQVSVEIEWELQKENSKRWNPEIQYTSNYYKSNNVEFAVNTEGVYSEPRPIGTRYLTRNL

SEQ ID NO: 655 - DNA, 2208 bp, synthetic construct
  misc_feature 1..2208: note = Adeno Associated Virus Capsid Protein Variant
  source 1..2208: mol_type = other DNA
atggctgccgatggttatcttccagattggctcgaggacaaccttagtgaaggaattcgcgagtggtgggctttgaaacctggagcccctcaacccaaggcaaatcaacaacatcaagacaacgctcgaggtcttgtgcttccgggttacaaataccttggacccggcaacggactcgacaagggggagccggtcaacgcagcagacgcggcggccctcgagcacgacaaggcctacgaccagcagctcaaggccggagacaacccgtacctcaagtacaaccacgccgacgccgagttccaggagcggctcaaagaagatacgtcttttgggggcaacctcgggcgagcagtcttccaggccaaaaagaggcttcttgaacctcttggtctggttgaggaagcggctaagacggctcctggaaagaagaggcctgtagagcagtctcctcaggaaccggactcctccgcgggtattggcaaatcgggtgcacagcccgctaaaaagagactcaatttcggtcagactggcgacacagagtcagtcccagaccctcaaccaatcggagaacctcccgcagccccctcaggtgtgggatctcttacaatggcttcaggtggtggcgcaccagtggcagacaataacgaaggtgccgatggagtgggtagttcctcgggaaattggcattgcgattcccaatggctgggggacagagtcatcaccaccagcacccgaacctgggccctgcccacctacaacaatcacctctacaagcaaatctccaacagcacatctggaggatcttcaaatgacaacgcctacttcggctacagcaccccctgggggtattttgacttcaacagattccactgccacttctcaccacgtgactggcagcgactcatcaacaacaactggggattccggcctaagcgactcaacttcaagctcttcaacattcaggtcaaagaggttacggacaacaatggagtcaagaccatcgccaataaccttaccagcacggtccaggtcttcacggactcagactatcagctcccgtacgtgctcgggtcggctcacgagggctgcctcccgccgttcccagcggacgttttcatgattcctcagtacgggtatctgacgcttaatgatggaagccaggccgtgggtcgttcgtccttttactgcctggaatatttcccgtcgcaaatgctaagaacgggtaacaacttccagttcagctacgagtttgagaacgtacctttccatagcagctacgctcacagccaaagcctggaccgactaatgaatccactcatcgaccaatacttgtactatctctcaaagactattaaccgttctggacagaatcaacaaacgctaaaattcagtgtggccggacccagcaacatggctgtccagggaagaaactacatacctggacccagctaccgacaacaacgtgtctcaaccactgtgactcaaaacaacaacagcgagtttgcttggcctggagcttctagttgggctctcaatggacgtaatagcttgatgaatcctggacctgctatggccagccacaaagaaggagaggaccgtttcttccctctgtctggatctttaatttttggcaaacaaggaactggaagagacaacgtggatgcggacaaagtcatgataaccaacgaagaagaaattaaaactactaacccggtagcaacggagtcctatggacaagtggccacaaaccaccagaaggcccgggcacaggcgcagaccggctgggttcaaaaccaaggaatacttccgggtatggtttggcaggacagagatgtgtacctgcaaggacccatttgggccaaaattcctcacacggacggcaactttcacccttctccgctgatgggagggtttggaatgaagcacccgcctcctcagatcctcatcaaaaacacacctgtacctgcggatcctccaacggccttcaacaagggcaagctgaactctttcatcacccagtattctactggccaagtcagcgtggagatcgagtgggagctgcagaaggaaaacagcaagcgctggaacccggagatccagtacacttccaactattacaagtctaataatgttgaatttgctgttaatactgaaggtgtatatagtgaaccccgccccattggcaccagatacctgactcgtaatctg

SEQ ID NO: 656 - protein, 736 aa, synthetic construct
  REGION 1..736: note = Adeno Associated Virus Capsid Protein Variant
MAADGYLPDWLEDNLSEGIREWWALKPGAPQPKANQQHQDNARGLVLPGYKYLGPGNGLDKGEPVNAADAAALEHDKAYDQQLKAGDNPYLKYNHADAEFQERLKEDTSFGGNLGRAVFQAKKRLLEPLGLVEEAAKTAPGKKRPVEQSPQEPDSSAGIGKSGAQPAKKRLNFGQTGDTESVPDPQPIGEPPAAPSGVGSLTMASGGGAPVADNNEGADGVGSSSGNWHCDSQWLGDRVITTSTRTWALPTYNNHLYKQISNSTSGGSSNDNAYFGYSTPWGYFDFNRFHCHFSPRDWQRLINNNWGFRPKRLNFKLFNIQVKEVTDNNGVKTIANNLTSTVQVFTDSDYQLPYVLGSAHEGCLPPFPADVFMIPQYGYLTLNDGSQAVGRSSFYCLEYFPSQMLRTGNNFQFSYEFENVPFHSSYAHSQSLDRLMNPLIDQYLYYLSKTINRSGQNQQTLKFSVAGPSNMAVQGRNYIPGPSYRQQRVSTTVTQNNNSEFAWPGASSWALNGRNSLMNPGPAMASHKEGEDRFFPLSGSLIFGKQGTGRDNVDADKVMITNEEEIKTTNPVATESYGQVATNHQKARAQAQTGWVQNQGILPGMVWQDRDVYLQGPIWAKIPHTDGNFHPSPLMGGFGMKHPPPQILIKNTPVPADPPTAFNKGKLNSFITQYSTGQVSVEIEWELQKENSKRWNPEIQYTSNYYKSNNVEFAVNTEGVYSEPRPIGTRYLTRNL

SEQ ID NO: 657 - DNA, 2208 bp, synthetic construct
  misc_feature 1..2208: note = Adeno Associated Virus Capsid Protein Variant
  source 1..2208: mol_type = other DNA
atggctgccgatggttatcttccagattggctcgaggacaaccttagtgaaggaattcgcgagtggtgggctttgaaacctggagcccctcaacccaaggcaaatcaacaacatcaagacaacgctcgaggtcttgtgcttccgggttacaaataccttggacccggcaacggactcgacaagggggagccggtcaacgcagcagacgcggcggccctcgagcacgacaaggcctacgaccagcagctcaaggccggagacaacccgtacctcaagtacaaccacgccgacgccgagttccaggagcggctcaaagaagatacgtcttttgggggcaacctcgggcgagcagtcttccaggccaaaaagaggcttcttgaacctcttggtctggttgaggaagcggctaagacggctcctggaaagaagaggcctgtagagcagtctcctcaggaaccggactcctccgcgggtattggcaaatcgggtgcacagcccgctaaaaagagactcaatttcggtcagactggcgacacagagtcagtcccagaccctcaaccaatcggagaacctcccgcagccccctcaggtgtgggatctcttacaatggcttcaggtggtggcgcaccagtggcagacaataacgaaggtgccgatggagtgggtagttcctcgggaaattggcattgcgattcccaatggctgggggacagagtcatcaccaccagcacccgaacctgggccctgcccacctacaacaatcacctctacaagcaaatctccaacagcacatctggaggatcttcaaatgacaacgcctacttcggctacagcaccccctgggggtattttgacttcaacagattccactgccacttctcaccacgtgactggcagcgactcatcaacaacaactggggattccggcctaagcgactcaacttcaagctcttcaacattcaggtcaaagaggttacggacaacaatggagtcaagaccatcgccaataaccttaccagcacggtccaggtcttcacggactcagactatcagctcccgtacgtgctcgggtcggctcacgagggctgcctcccgccgttcccagcggacgttttcatgattcctcagtacgggtatctgacgcttaatgatggaagccaggccgtgggtcgttcgtccttttactgcctggaatatttcccgtcgcaaatgctaagaacgggtaacaacttccagttcagctacgagtttgagggggtacctttccatagcagctacgctcacagccaaagcctggaccgactaatgaatccactcatcgaccaatacttgtactatctctcaaagactattaacggttctggacagaatcaacaaacgctaaaattcagtgtggccggacccagcaacatggctgtccagggaagaaactacatacctggacccagctaccgacaacaacgtgtctcaaccactgtgactcaaaacaacaacagcgaatttgcttggcctggagcttcttcttgggctctcaatggacgtaatagcttgatgaatcctggacctgctatggccagccacaaagaaggagaggaccgtttctttcctttgtctggatctttaatttttggcaaacaaggaactggaagagacaacgtggatgcggacaaagtcatgataaccaacgaagaagaaattaaaactactaacccggtagcaacggagtcctatggacaagtggccacaaaccaccagagtgcccgggcacaggcgcagaccggctgggttcaaaaccaaggaatacttccgggtatggtttggcaggacagagatgtgtacctgcaaggacccatttgggccaaaattcctcacacggacggcaactttcacccttctccgctgatgggagggtttggaatgaagcacccgcctcctcagatcctcatcaaaaacacacctgtacctgcggatcctccaacggccttcaacaagggcaagctgaactctttcatcacccagtattctactggccaagtcagcgtggagatcgagtgggagctgcagaaggaaaacagcaagcgctggaacccggagatccagtacacttccaactattacaagtctaataatgttgaatttgctgttaatactgaaggtgtatatagtgaaccccgccccattggcaccagatacctgactcgtaatctg

SEQ ID NO: 658 - protein, 736 aa, synthetic construct
  REGION 1..736: note = Adeno Associated Virus Capsid Protein Variant
MAADGYLPDWLEDNLSEGIREWWALKPGAPQPKANQQHQDNARGLVLPGYKYLGPGNGLDKGEPVNAADAAALEHDKAYDQQLKAGDNPYLKYNHADAEFQERLKEDTSFGGNLGRAVFQAKKRLLEPLGLVEEAAKTAPGKKRPVEQSPQEPDSSAGIGKSGAQPAKKRLNFGQTGDTESVPDPQPIGEPPAAPSGVGSLTMASGGGAPVADNNEGADGVGSSSGNWHCDSQWLGDRVITTSTRTWALPTYNNHLYKQISNSTSGGSSNDNAYFGYSTPWGYFDFNRFHCHFSPRDWQRLINNNWGFRPKRLNFKLFNIQVKEVTDNNGVKTIANNLTSTVQVFTDSDYQLPYVLGSAHEGCLPPFPADVFMIPQYGYLTLNDGSQAVGRSSFYCLEYFPSQMLRTGNNFQFSYEFEGVPFHSSYAHSQSLDRLMNPLIDQYLYYLSKTINGSGQNQQTLKFSVAGPSNMAVQGRNYIPGPSYRQQRVSTTVTQNNNSEFAWPGASSWALNGRNSLMNPGPAMASHKEGEDRFFPLSGSLIFGKQGTGRDNVDADKVMITNEEEIKTTNPVATESYGQVATNHQSARAQAQTGWVQNQGILPGMVWQDRDVYLQGPIWAKIPHTDGNFHPSPLMGGFGMKHPPPQILIKNTPVPADPPTAFNKGKLNSFITQYSTGQVSVEIEWELQKENSKRWNPEIQYTSNYYKSNNVEFAVNTEGVYSEPRPIGTRYLTRNL

SEQ ID NO: 659 - DNA, 2208 bp, synthetic construct
  misc_feature 1..2208: note = Adeno Associated Virus Capsid Protein Variant
  source 1..2208: mol_type = other DNA
atggctgccgatggttatcttccagattggctcgaggacaaccttagtgaaggaattcgcgagtggtgggctcagaaacctggagcccctcaacccaaggcaaatcaacaacatcaagacaacgctcgaggtcttgtgcttccgggttacaaataccttggacccggcaacggactcgacaagggggagccggtcaacgcagcagacgcggcggccctcgagcacgacaaggcctacgaccagcagctcaaggccggagacaacccgtacctcaagtacaaccacgccgacgccgagttccaggagcggctcaaagaagatacgtcttttgggggcaacctcgggcgagcagtcttccaggccaaaaagaggcttcttgaacctcttggtctggttgaggaagcggctaagacggctcctggaaagaagaggcctgtagagcagtctcctcaggaaccggactcctccgcgggtattggcaaatcgggtgcacagcccgctaaaaagagactcaatttcggtcagactggcgacacagagtcagtcccagaccctcaaccaatcggagaacctcccgcagccccctcaggtgtgggatctcttacaatggcttcaggtggtggcgcaccagtggcagacaataacgaaggtgccgatggagtgggtagttcctcgggaaattggcattgcgattcccaatggctgggggacagagtcatcaccaccagcacccgaacctgggccctgcccacctacaacaatcacctctacaagcaaatctccaacagcacatctggaggatcttcaaatgacaacgcctacttcggctacagcaccccctgggggtattttgacttcaacagattccactgccacttctcaccacgtgactggcagcgactcatcaacaacaactggggattccggcctaagcgactcaacttcaagctcttcaacattcaggtcaaagaggttacggacaacaatggagtcaagaccatcgccaataaccttaccagcacggtccaggtcttcacggactcagactatcagctcccgtacgtgctcgggtcggctcacgagggctgcctcccgccgttcccagcggacgttttcatgattcctcagtacgggtatctgacgcttaatgatggaagccaggccgtgggtcgttcgtccttttactgcctggaatatttcccgtcgcaaatgctaagaacgggtaacaacttccagttcagctacgagtttgagaacgtacctttccatagcagctacgctcacagccaaagcctggaccgactaatgaatccactcatcgaccaatacttgtactatctctcaaagactattaacggttctggacagaatcaacaaacgctaaaattcagtgtggccggacccagcaacatggctgtccagggaagaaactacatacctggacccagctaccgacaacaacgtgtctcaaccactgtgactcaaaacaacaacagcgaatttgcttggcctggagcttcttcttgggctctcaatggacgtaatagcttgatgaatcctggacctgctatggccagccacaaagaaggagaggaccgtttctttcctttgtctggatctttaatttttggcaaacaaggaactggaagagacaacgtggatgcggacaaagtcatgataaccaacgaagaagaaattaaaactactaacccggtagcaacggagtcctatggacaagtggccacaaaccaccagagtgcccgggcacaggcgcagaccggctgggttcaaaaccaaggaatacttccgggtatggtttggcaggacagagatgtgtacctgcaaggacccatttgggccaaaattcctcacacggacggcaactttcacccttctccgctgatgggagggtttggaatgaagcacccgcctcctcagatcctcatcaaaaacacacctgtacctgcggatcctccaacggccttcaacaagggcaagctgaactctttcatcacccagtattctactggccaagtcagcgtggagatcgagtgggagctgcagaaggaaaacagcaagcgctggaacccggagatccagtacacttccaactattacaagtctaataatgttgaatttgctgttaatactgaaggtgtatatagtgaaccccgccccattggcaccagatacctgactcgtaatctg

SEQ ID NO: 660 - protein, 736 aa, synthetic construct
  REGION 1..736: note = Adeno Associated Virus Capsid Protein Variant
MAADGYLPDWLEDNLSEGIREWWAQKPGAPQPKANQQHQDNARGLVLPGYKYLGPGNGLDKGEPVNAADAAALEHDKAYDQQLKAGDNPYLKYNHADAEFQERLKEDTSFGGNLGRAVFQAKKRLLEPLGLVEEAAKTAPGKKRPVEQSPQEPDSSAGIGKSGAQPAKKRLNFGQTGDTESVPDPQPIGEPPAAPSGVGSLTMASGGGAPVADNNEGADGVGSSSGNWHCDSQWLGDRVITTSTRTWALPTYNNHLYKQISNSTSGGSSNDNAYFGYSTPWGYFDFNRFHCHFSPRDWQRLINNNWGFRPKRLNFKLFNIQVKEVTDNNGVKTIANNLTSTVQVFTDSDYQLPYVLGSAHEGCLPPFPADVFMIPQYGYLTLNDGSQAVGRSSFYCLEYFPSQMLRTGNNFQFSYEFENVPFHSSYAHSQSLDRLMNPLIDQYLYYLSKTINGSGQNQQTLKFSVAGPSNMAVQGRNYIPGPSYRQQRVSTTVTQNNNSEFAWPGASSWALNGRNSLMNPGPAMASHKEGEDRFFPLSGSLIFGKQGTGRDNVDADKVMITNEEEIKTTNPVATESYGQVATNHQSARAQAQTGWVQNQGILPGMVWQDRDVYLQGPIWAKIPHTDGNFHPSPLMGGFGMKHPPPQILIKNTPVPADPPTAFNKGKLNSFITQYSTGQVSVEIEWELQKENSKRWNPEIQYTSNYYKSNNVEFAVNTEGVYSEPRPIGTRYLTRNL

SEQ ID NO: 661 - DNA, 2208 bp, synthetic construct
  misc_feature 1..2208: note = Adeno Associated Virus Capsid Protein Variant
  source 1..2208: mol_type = other DNA
atggctgccgatggttatcttccagattggctcgaggacaaccttagtgaaggaattcgcgagtggtgggctttgaaacctggagcccctcaacccaaggcaaatcaacaacatcaagacaacgctcgaggtcttgtgcttccgggttacaaataccttggacccggcaacggactcgacaagggggagccggtcaacgcagcagacgcggcggccctcgagcacgacaaggcctacgaccagcagctcaaggccggagacaacccgtacctcaagtacaaccacgccgacgccgagttccaggagcggctcaaagaagatacgtcttttgggggcaacctcgggcgagcagtcttccaggccaaaaagaggcttcttgaacctcttggtctggttgaggaagcggctaagacggctcctggaaagaagaggcctgtagagcagtctcctcaggaaccggactcctccgcgggtattggcaaatcgggtgcacagcccgctaaaaagagactcaatttcggtcagactggcgacacagagtcagtcccagaccctcaaccaatcggagaacctcccgcagccccctcaggtgtgggatctcttacaatggcttcaggtggtggcgcaccagtggcagacaataacgaaggtgccgatggagtgggtagttcctcgggaaattggcattgcgattcccaatggctgggggacagagtcatcaccaccagcacccgaacctgggccctgcccacctacaacaatcacctctacaagcaaatctccaacagcacatctggaggatcttcaaatgacaacgcctacttcggctacagcaccccctgggggtattttgacttcaacagattccactgccacttctcaccacgtgactggcagcgactcatcaacaacaactggggattccggcctaagcgactcaacttcaagctcttcaacattcaggtcaaagaggttacggacaacaatggagtcaagaccatcgccaataaccttaccagcacggtccaggtcttcacggactcagactatcagctcccgtacgtgctcgggtcggctcacgagggctgcctcccgccgttcccagcggacgttttcatgattcctcagtacgggtatctgacgcttaatgatggaagccaggccgtgggtcgttcgtccttttactgcctggaatatttcccgtcgcaaatgctaagaacgggtaacaacttccagttcagctacgagtttgagaacgtacctttccatagcagctacgctcacagccaaagcctggaccgactaatgaatccactcatcgaccaatacttgtactatctctcaaagactattaacggttctggacagaatcaacaaacgctaaaattcagtgtggccggacccagcaacatgtgggtccagggaagaaactacatacctggacccagctaccgacaacaacgtgtctcaaccactgtgactcaaaacaacaacagcgaatttgcttggcctggagcttcttcttgggctctcaatggacgtaatagcttgatgaatcctggacctgctatggccagccacaaagaaggagaggaccgtttctttcctttgtctggatctttaatttttggcaaacaaggaactggaagagacaacgtggatgcggacaaagtcatgataaccaacgaagaagaaattaaaactactaacccggtagcaacggagtcctatggacaagtggccacaaaccaccagagtgcccgggcacaggcgcagaccggctgggttcaaaaccaaggaatacttccgggtatggtttggcaggacagagatgtgtacctgcaaggacccatttgggccaaaattcctcacacggacggcaactttcacccttctccgctgatgggagggtttggaatgaagcacccgcctcctcagatcctcatcaaaaacacacctgtacctgcggatcctccaacggccttcaacaagggcaagctgaactctttcatcacccagtattctactggccaagtcagcgtggagatcgagtgggagctgcagaaggaaaacagcaagcgctggaacccggagatccagtacacttccaactattacaagtctaataatgttgaatttgctgttaatactgaaggtgtatatagtgaaccccgccccattggcaccagatacctgactcgtaatctg

SEQ ID NO: 662 - protein, 736 aa, synthetic construct
  REGION 1..736: note = Adeno Associated Virus Capsid Protein Variant
MAADGYLPDWLEDNLSEGIREWWALKPGAPQPKANQQHQDNARGLVLPGYKYLGPGNGLDKGEPVNAADAAALEHDKAYDQQLKAGDNPYLKYNHADAEFQERLKEDTSFGGNLGRAVFQAKKRLLEPLGLVEEAAKTAPGKKRPVEQSPQEPDSSAGIGKSGAQPAKKRLNFGQTGDTESVPDPQPIGEPPAAPSGVGSLTMASGGGAPVADNNEGADGVGSSSGNWHCDSQWLGDRVITTSTRTWALPTYNNHLYKQISNSTSGGSSNDNAYFGYSTPWGYFDFNRFHCHFSPRDWQRLINNNWGFRPKRLNFKLFNIQVKEVTDNNGVKTIANNLTSTVQVFTDSDYQLPYVLGSAHEGCLPPFPADVFMIPQYGYLTLNDGSQAVGRSSFYCLEYFPSQMLRTGNNFQFSYEFENVPFHSSYAHSQSLDRLMNPLIDQYLYYLSKTINGSGQNQQTLKFSVAGPSNMWVQGRNYIPGPSYRQQRVSTTVTQNNNSEFAWPGASSWALNGRNSLMNPGPAMASHKEGEDRFFPLSGSLIFGKQGTGRDNVDADKVMITNEEEIKTTNPVATESYGQVATNHQSARAQAQTGWVQNQGILPGMVWQDRDVYLQGPIWAKIPHTDGNFHPSPLMGGFGMKHPPPQILIKNTPVPADPPTAFNKGKLNSFITQYSTGQVSVEIEWELQKENSKRWNPEIQYTSNYYKSNNVEFAVNTEGVYSEPRPIGTRYLTRNL

SEQ ID NO: 663 - DNA, 2208 bp, synthetic construct
  misc_feature 1..2208: note = Adeno Associated Virus Capsid Protein Variant
  source 1..2208: mol_type = other DNA
atggctgccgatggttatcttccagattggctcgaggacaaccttagtgaaggaattcgcgagtggtgggctttgaaacctggagcccctcaacccaaggcaaatcaacaacatcaagacaacgctcgaggtcttgtgcttccgggttacaaataccttggacccggcaacggactcgacaagggggagccggtcaacgcagcagacgcggcggccctcgagcacgacaaggcctacgaccagcagctcaaggccggagacaacccgtacctcaagtacaaccacgccgacgccgagttccaggagcggctcaaagaagatacgtcttttgggggcaacctcgggcgagcagtcttccaggccaaaaagaggcttcttgaacctcttggtctggttgaggaagcggctaagacggctcctggaaagaagaggcctgtagagcagtctcctcaggaaccggactcctccgcgggtattggcaaatcgggtgcacagcccgctaaaaagagactcaatttcggtcagactggcgacacagagtcagtcccagaccctcaaccaatcggagaacctcccgcagccccctcaggtgtgggatctcttacaatggcttcaggtggtggcgcaccagtggcagacaataacgaaggtgccgatggagtgggtagttcctcgggaaattggcattgcgattcccaatggctgggggacagagtcatcaccaccagcacccgaacctgggccctgcccacctacaacaatcacctctacaagcaaatctccaacagcacatctggaggatcttcaaatgacaacgcctacttcggctacagcaccccctgggggtattttgacttcaacagattccactgccacttctcaccacgtgactggcagcgactcatcaacaacaactggggattccggcctaagcgactcaacttcaagctcttcaacattcaggtcaaagaggttacggacaacaatggagtcaagaccatcgccaataaccttaccagcacggtccaggtcttcacggactcagactatcagctcccgtacgtgctcgggtcggctcacgagggctgcctcccgccgttcccagcggacgttttcatgattcctcagtacgggtatctgacgcttaatgatggaagccaggccgtgggtcgttcgtccttttactgcctggaatatttcccgtcgcaaatgctaagaacgggtaacaacttccagttcagctacgagtttgagaacgtacctttccatagcagctacgctcacagccaaagcctggaccgactaatgaatccactcatcgaccaatacttgtactatctctcaaagactattaacggttctggacagaatcaacaaacgctagagttcagtgtggccggacccagcaacatggctgtccagggaagaaactacatacctggacccagctaccgacaacaacgtgtctcaaccactgtgactcaaaacaacaacagcgaatttgcttggcctggagcttcttcttgggctctcaatggacgtaatagcttgatgaatcctggacctgctatggccagccacaaagaaggagaggaccgtttctttcctttgtctggatctttaatttttggcaaacaaggaactggaagagacaacgtggatgcggacaaagtcatgataaccaacgaagaagaaattaaaactactaacccggtagcaacggagtcctatggacaagtggccacaaaccaccagagtgcccgggcacaggcgcagaccggctgggttcaaaaccaaggaatacttccgggtatggtttggcaggacagagatgtgtacctgcaaggacccatttgggccaaaattcctcacacggacggcaactttcacccttctccgctgatgggagggtttggaatgaagcacccgcctcctcagatcctcatcaaaaacacacctgtacctgcggatcctccaacggccttcaacaagggcaagctgaactctttcatcacccagtattctactggccaagtcagcgtggagatcgagtgggagctgcagaaggaaaacagcaagcgctggaacccggagatccagtacacttccaactattacaagtctaataatgttgaatttgctgttaatactgaaggtgtatatagtgaaccccgccccattggcaccagatacctgactcgtaatctg

SEQ ID NO: 664 - protein, 736 aa, synthetic construct
  REGION 1..736: note = Adeno Associated Virus Capsid Protein Variant
MAADGYLPDWLEDNLSEGIREWWALKPGAPQPKANQQHQDNARGLVLPGYKYLGPGNGLDKGEPVNAADAAALEHDKAYDQQLKAGDNPYLKYNHADAEFQERLKEDTSFGGNLGRAVFQAKKRLLEPLGLVEEAAKTAPGKKRPVEQSPQEPDSSAGIGKSGAQPAKKRLNFGQTGDTESVPDPQPIGEPPAAPSGVGSLTMASGGGAPVADNNEGADGVGSSSGNWHCDSQWLGDRVITTSTRTWALPTYNNHLYKQISNSTSGGSSNDNAYFGYSTPWGYFDFNRFHCHFSPRDWQRLINNNWGFRPKRLNFKLFNIQVKEVTDNNGVKTIANNLTSTVQVFTDSDYQLPYVLGSAHEGCLPPFPADVFMIPQYGYLTLNDGSQAVGRSSFYCLEYFPSQMLRTGNNFQFSYEFENVPFHSSYAHSQSLDRLMNPLIDQYLYYLSKTINGSGQNQQTLEFSVAGPSNMAVQGRNYIPGPSYRQQRVSTTVTQNNNSEFAWPGASSWALNGRNSLMNPGPAMASHKEGEDRFFPLSGSLIFGKQGTGRDNVDADKVMITNEEEIKTTNPVATESYGQVATNHQSARAQAQTGWVQNQGILPGMVWQDRDVYLQGPIWAKIPHTDGNFHPSPLMGGFGMKHPPPQILIKNTPVPADPPTAFNKGKLNSFITQYSTGQVSVEIEWELQKENSKRWNPEIQYTSNYYKSNNVEFAVNTEGVYSEPRPIGTRYLTRNL

SEQ ID NO: 665 - DNA, 2208 bp, synthetic construct
  misc_feature 1..2208: note = Adeno Associated Virus Capsid Protein Variant
  source 1..2208: mol_type = other DNA
atggctgccgatggttatcttccagattggctcgaggacaaccttagtgaaggaattcgcgagtggtgggctttgaaacctggagcccctcaacccaaggcaaatcaacaacatcaagacaacgctcgaggtcttgtgcttccgggttacaaataccttggacccggcaacggactcgacaagggggagccggtcaacgcagcagacgcggcggccctcgagcacgacaaggcctacgaccagcagctcaaggccggagacaacccgtacctcaagtacaaccacgccgacgccgagttccaggagcggctcaaagaagatacgtcttttgggggcaacctcgggcgagcagtcttccaggccaaaaagaggcttcttgaacctcttggtctggttgaggaagcggctaagacggctcctggaaagaagaggcctgtagagcagtctcctcaggaaccggactcctccgcgggtattggcaaagggggtgcacagcccgctaaaaagagactcaatttcggtcagactggcgacacagagtcagtcccagaccctcaaccaatcggagaacctcccgcagccccctcaggtgtgggatctcttacaatggcttcaggtggtggcgcaccagtggcagacaataacgaaggtgccgatggagtgggtagttcctcgggaaattggcattgcgattcccaatggctgggggacagagtcatcaccaccagcacccgaacctgggccctgcccacctacaacaatcacctctacaagcaaatctccaacagcacatctggaggatcttcaaatgacaacgcctacttcggctacagcaccccctgggggtattttgacttcaacagattccactgccacttctcaccacgtgactggcagcgactcatcaacaacaactggggattccggcctaagcgactcaacttcaagctcttcaacattcaggtcaaagaggttacggacaacaatggagtcaagaccatcgccaataaccttaccagcacggtccaggtcttcacggactcagactatcagctcccgtacgtgctcgggtcggctcacgagggctgcctcccgccgttcccagcggacgttttcatgattcctcagtacgggtatctgacgcttaatgatggaagccaggccgtgggtcgttcgtccttttactgcctggaatatttcccgtcgcaaatgctaagaacgggtaacaacttccagttcagctacgagtttgagaacgtacctttccatagcagctacgctcacagccaaagcctggaccgactaatgaatccactcatcgaccaatacttgtactatctctcaaagaatattaacggttctggacagaatcaacaaacgctaaaattcagtgtggccggacccagcaacatggctgtccagggaagaaactacatacctggacccagctaccgacaacaacgtgtctcaaccactgtgactcaaaacaacaacagcgaatttgcttggcctggagcttcttcttgggctctcaatggacgtaatagcttgatgaatcctggacctgctatggccagccacaaagaaggagaggaccgtttctttcctttgtctggatctttaatttttggcaaacaaggaactggaagagacaacgtggatgcggacaaagtcatgataaccaacgaagaagaaattaaaactactaacccggtagcaacggagtcctatggacaagtggccacaaaccaccagagtgcccgggcacaggcgcagaccggctgggttcaaaaccaaggaatacttccgggtatggtttggcaggacagagatgtgtacctgcaaggacccatttgggccaaaattcctcacacggacggcaactttcacccttctccgctgatgggagggtttggaatgaagcacccgcctcctcagatcctcatcaaaaacacacctgtacctgcggatcctccaacggccttcaacaagggcaagctgaactctttcatcacccagtattctactggccaagtcagcgtggagatcgagtgggagctgcagaaggaaaacagcaagcgctggaacccggagatccagtacacttccaactattacaagtctaataatgttgaatttgctgttaatactgaaggtgtatatagtgaaccccgccccattggcaccagatacctgactcgtaatctg

SEQ ID NO: 666 - protein, 736 aa, synthetic construct
  REGION 1..736: note = Adeno Associated Virus Capsid Protein Variant
MAADGYLPDWLEDNLSEGIREWWALKPGAPQPKANQQHQDNARGLVLPGYKYLGPGNGLDKGEPVNAADAAALEHDKAYDQQLKAGDNPYLKYNHADAEFQERLKEDTSFGGNLGRAVFQAKKRLLEPLGLVEEAAKTAPGKKRPVEQSPQEPDSSAGIGKGGAQPAKKRLNFGQTGDTESVPDPQPIGEPPAAPSGVGSLTMASGGGAPVADNNEGADGVGSSSGNWHCDSQWLGDRVITTSTRTWALPTYNNHLYKQISNSTSGGSSNDNAYFGYSTPWGYFDFNRFHCHFSPRDWQRLINNNWGFRPKRLNFKLFNIQVKEVTDNNGVKTIANNLTSTVQVFTDSDYQLPYVLGSAHEGCLPPFPADVFMIPQYGYLTLNDGSQAVGRSSFYCLEYFPSQMLRTGNNFQFSYEFENVPFHSSYAHSQSLDRLMNPLIDQYLYYLSKNINGSGQNQQTLKFSVAGPSNMAVQGRNYIPGPSYRQQRVSTTVTQNNNSEFAWPGASSWALNGRNSLMNPGPAMASHKEGEDRFFPLSGSLIFGKQGTGRDNVDADKVMITNEEEIKTTNPVATESYGQVATNHQSARAQAQTGWVQNQGILPGMVWQDRDVYLQGPIWAKIPHTDGNFHPSPLMGGFGMKHPPPQILIKNTPVPADPPTAFNKGKLNSFITQYSTGQVSVEIEWELQKENSKRWNPEIQYTSNYYKSNNVEFAVNTEGVYSEPRPIGTRYLTRNL

SEQ ID NO: 667 - DNA, 2208 bp, synthetic construct
  misc_feature 1..2208: note = Adeno Associated Virus Capsid Protein Variant
  source 1..2208: mol_type = other DNA
atggctgccgatggttatcttccagattggctcgaggacaaccttagtgaaggaattcgcgagatgtgggctttgaaacctggagcccctcaacccaaggcaaatcaacaacatcaagacaacgctcgaggtcttgtgcttccgggttacaaataccttggacccggcaacggactcgacaagggggagccggtcaacgcagcagacgcggcggccctcgagcacgacaaggcctacgaccagcagctcaaggccggagacaacccgtacctcaagtacaaccacgccgacgccgagttccaggagcggctcaaagaagatacgtcttttgggggcaacctcgggcgagcagtcttccaggccaaaaagaggcttcttgaacctcttggtctggttgaggaagcggctaagacggctcctggaaagaagaggcctgtagagcagtctcctcaggaaccggactcctccgcgggtattggcaaatcgggtgcacagcccgctaaaaagagactcaatttcggtcagactggcgacacagagtcagtcccagaccctcaaccaatcggagaacctcccgcagccccctcaggtgtgggatctcttacaatggcttcaggtggtggcgcaccagtggcagacaataacgaaggtgccgatggagtgggtagttcctcgggaaattggcattgcgattcccaatggctgggggacagagtcatcaccaccagcacccgaacctgggccctgcccacctacaacaatcacctctacaagcaaatctccaacagcacatctggaggatcttcaaatgacaacgcctacttcggctacagcaccccctgggggtattttgacttcaacagattccactgccacttctcaccacgtgactggcagcgactcatcaacaacaactggggattccggcctaagcgactcaacttcaagctcttcaacattcaggtcaaagaggttacggacaacaatggagtcaagaccatcgccaataaccttaccagcacggtccaggtcttcacggactcagactatcagctcccgtacgtgctcgggtcggctcacgagggctgcctcccgccgttcccagcggacgttttcatgattcctcagtacgggtatctgacgcttaatgatggaagccaggccgtgggtcgttcgtccttttactgcctggaatatttcccgtcgcaaatgctaagaacgggtaacaacttccagttcagctacgagtttgagaacgtacctttccatagcagctacgctcacagccaaagcctggaccgactaatgaatccactcatcgaccaatacttgtactatctctcaaagactattaacggttctggacagaatcaacaaacgctaaaattcagtgtggccggacccagcaacatggctgtccagggaagaaactacatacctggacccagctaccgacaacaacgtgtctcaaccactgtgactcaaaacaacaacagcgaatttgcttggcctggagcttcttcttgggctctcaatggacgtaatagcttgatgaatcctggacctgctatggccagccacaaagaaggagaggaccgtttctttcctttgtctggatctttaatttttggcaaacaaggaactggaagagacaacgtggatgcggacaaagtcatgataaccaacgaagaagaaattaaaactactaacccggtagcaacggagtcctatggacaagtggccacaaaccaccagagtgcccgggcacaggcgcagaccggctgggttcaaaaccaaggaatacttccgggtatggtttggcaggacagagatgtgtacctgcaaggacccatttgggccaaaattcctcacacggacggcaactttcacccttctccgctgatgggagggtttggaatgaagcacccgcctcctcagatcctcatcaaaaacacacctgtacctgcggatcctccaacggccttcaacaagggcaagctgaactctttcatcacccagtattctactggccaagtcagcgtggagatcgagtgggagctgcagaaggaaaacagcaagcgctggaacccggagatccagtacacttccaactattacaagtctaataatgttgaatttgctgttaatactgaaggtgtatatagtgaaccccgccccattggcaccagatacctgactcgtaatctg

SEQ ID NO: 668 - protein, 736 aa, synthetic construct
  REGION 1..736: note = Adeno Associated Virus Capsid Protein Variant
MAADGYLPDWLEDNLSEGIREMWALKPGAPQPKANQQHQDNARGLVLPGYKYLGPGNGLDKGEPVNAADAAALEHDKAYDQQLKAGDNPYLKYNHADAEFQERLKEDTSFGGNLGRAVFQAKKRLLEPLGLVEEAAKTAPGKKRPVEQSPQEPDSSAGIGKSGAQPAKKRLNFGQTGDTESVPDPQPIGEPPAAPSGVGSLTMASGGGAPVADNNEGADGVGSSSGNWHCDSQWLGDRVITTSTRTWALPTYNNHLYKQISNSTSGGSSNDNAYFGYSTPWGYFDFNRFHCHFSPRDWQRLINNNWGFRPKRLNFKLFNIQVKEVTDNNGVKTIANNLTSTVQVFTDSDYQLPYVLGSAHEGCLPPFPADVFMIPQYGYLTLNDGSQAVGRSSFYCLEYFPSQMLRTGNNFQFSYEFENVPFHSSYAHSQSLDRLMNPLIDQYLYYLSKTINGSGQNQQTLKFSVAGPSNMAVQGRNYIPGPSYRQQRVSTTVTQNNNSEFAWPGASSWALNGRNSLMNPGPAMASHKEGEDRFFPLSGSLIFGKQGTGRDNVDADKVMITNEEEIKTTNPVATESYGQVATNHQSARAQAQTGWVQNQGILPGMVWQDRDVYLQGPIWAKIPHTDGNFHPSPLMGGFGMKHPPPQILIKNTPVPADPPTAFNKGKLNSFITQYSTGQVSVEIEWELQKENSKRWNPEIQYTSNYYKSNNVEFAVNTEGVYSEPRPIGTRYLTRNL

SEQ ID NO: 669 - DNA, 2208 bp, synthetic construct
  misc_feature 1..2208: note = Adeno Associated Virus Capsid Protein Variant
  source 1..2208: mol_type = other DNA
atggctgccgatggttatcttccagattggctcgaggacaaccttagtgaaggaattcgcgagtggtgggctttgaaacctggagcccctcaacccaaggcaaatcaacaacatcaagacaacgctcgaggtcttgtgcttccgggttacaaataccttggacccggcaacggactcgacaagggggagccggtcaacgcagcagacgcggcggccctcgagcacgacaaggcctacgaccagcagctcaaggccggagacaacccgtacctcaagtacaaccacgccgacgccgagttccaggagcggctcaaagaagatacgtcttttgggggcaacctcgggcgagcagtcttccaggccaaaaagaggcttcttgaacctcttggtctggttgaggaagcggctaagacggctcctggaaagaagaggcctgtagagcagtctcctcaggaaccggactcctccgcgggtattggcaaatcgggtgcacagcccgctaaaaagagactcaatttcggtcagactggcgacacagagtcagtcccagaccctcaaccaatcggagaacctcccgcagccccctcaggtgtgggatctcttacaatggcttcaggtggtggcgcaccagtggcagacaataacgaaggtgccgatggagtgggtagttcctcgggaaattggcattgcgattcccaatggctgggggacagagtcatcaccaccagcacccgaacctgggccctgcccacctacaacaatcacctctacaagcaaatctccaacagcacatctggaggatcttcaaatgacaacgcctacttcggctacagcaccccctgggggtattttgacttcaacagattccactgccacttctcaccacgtgactggcagcgactcatcaacaacaactggggattccggcctaagcgactcaacttcaagctcttcaacattcaggtcaaagaggttacggacaacaatggagtcaagaccatcgccaataaccttaccagcacggtccaggtcttcacggactcagactatcagctcccgtacgtgctcgggtcggctcacgagggctgcctcccgccgttcccagcggacgttttcatgattcctcagtacgggtatctgacgcttaatgatggaagccaggccgtgggtcgttcgtccttttactgcctggaatatttcccgtcgcaaatgctaagaacgggtaacaacttccagttcgattacgagtttgagaacgtacctttccatagcagctacgctcacagccaaagcctggaccgactaatgaatccactcatcgaccaatacttgtactatctctcaaagactattaacggttctggacagaatcaacaaacgctaaaattcagtgtggccggacccagcaacatggctgtccagggaagaaactacatacctggacccagctaccgacaacaacgtgtctcaaccactgtgactcaaaacaacaacagcgaatttgcttggcctggagcttcttcttgggctctcaatggacgtaatagcttgatgaatcctggacctgctatggccagccacaaagaaggagaggaccgtttctttcctttgtctggatctttaatttttggcaaacaaggaactggaagagacaacgtggatgcggacaaagtcatgataaccaacgaagaagaaattaaaactactaacccggtagcaacggagtcctatggacaagtggccacaaaccaccagagtgcccgggcacaggcgcagaccggctgggttcaaaaccaaggaatacttccgggtatggtttggcaggacagagatgtgtacctgcaaggacccatttgggccaaaattcctcacacggacggcaactttcacccttctccgctgatgggagggtttggaatgaagcacccgcctcctcagatcctcatcaaaaacacacctgtacctgcggatcctccaacggccttcaacaagggcaagctgaactctttcatcacccagtattctactggccaagtcagcgtggagatcgagtgggagctgcagaaggaaaacagcaagcgctggaacccggagatccagtacacttccaactattacaagtctaataatgttgaatttgctgttaatactgaaggtgtatatagtgaaccccgccccattggcaccagatacctgactcgtaatctg

SEQ ID NO: 670 - protein, 736 aa, synthetic construct
  REGION 1..736: note = Adeno Associated Virus Capsid Protein Variant
MAADGYLPDWLEDNLSEGIREWWALKPGAPQPKANQQHQDNARGLVLPGYKYLGPGNGLDKGEPVNAADAAALEHDKAYDQQLKAGDNPYLKYNHADAEFQERLKEDTSFGGNLGRAVFQAKKRLLEPLGLVEEAAKTAPGKKRPVEQSPQEPDSSAGIGKSGAQPAKKRLNFGQTGDTESVPDPQPIGEPPAAPSGVGSLTMASGGGAPVADNNEGADGVGSSSGNWHCDSQWLGDRVITTSTRTWALPTYNNHLYKQISNSTSGGSSNDNAYFGYSTPWGYFDFNRFHCHFSPRDWQRLINNNWGFRPKRLNFKLFNIQVKEVTDNNGVKTIANNLTSTVQVFTDSDYQLPYVLGSAHEGCLPPFPADVFMIPQYGYLTLNDGSQAVGRSSFYCLEYFPSQMLRTGNNFQFDYEFENVPFHSSYAHSQSLDRLMNPLIDQYLYYLSKTINGSGQNQQTLKFSVAGPSNMAVQGRNYIPGPSYRQQRVSTTVTQNNNSEFAWPGASSWALNGRNSLMNPGPAMASHKEGEDRFFPLSGSLIFGKQGTGRDNVDADKVMITNEEEIKTTNPVATESYGQVATNHQSARAQAQTGWVQNQGILPGMVWQDRDVYLQGPIWAKIPHTDGNFHPSPLMGGFGMKHPPPQILIKNTPVPADPPTAFNKGKLNSFITQYSTGQVSVEIEWELQKENSKRWNPEIQYTSNYYKSNNVEFAVNTEGVYSEPRPIGTRYLTRNL

SEQ ID NO: 671 - DNA, 2208 bp, synthetic construct
  misc_feature 1..2208: note = Adeno Associated Virus Capsid Protein Variant
  source 1..2208: mol_type = other DNA
atggctgccgatggttatcttccagattggctcgaggacaaccttagtgaaggaattcgcgagtggtgggctttgaaacctggagcccctcaacccaaggcaaatcaacaacatcaagacaacgctcgaggtcttgtgcttccgggttacaaataccttggacccggcaacggactcgacaagggggagccggtcaacgcagcagacgcggcggccctcgagcacgacaaggcctacgaccagcagctcaaggccggagacaacccgtacctcaagtacaaccacgccgacgccgagttccaggagcggctcaaagaagatacgtcttttgggggcaacctcgggcgagcagtcttccaggccaaaaagaggcttcttgaacctcttggtctggttgaggaagcggctaagacggctcctggaaagaagaggcctgtagagcagtctcctcaggaaccggactcctccgcgggtattggcaaatcgggtgcacagcccgctaaaaagagactcaatttcggtcagactggcgacacagagtcagtcccagaccctcaaccaatcggagaacctcccgcagccccctcaggtgtgggatctcttacaatggcttcaggtggtggcgcaccagtggcagacaataacgaaggtgccgatggagtgggtagttcctcgggaaattggcattgcgattcccaatggctgggggacagagtcatcaccaccagcacccgaacctgggccctgcccacctacaacaatcacctctacaagcaaatctccaacagcacatctggaggatcttcaaatgacaacgcctacttcggctacagcaccccctgggggtattttgacttcaacagattccactgccacttctcaccacgtgactggcagcgactcatcaacaacaactggggattccggcctaagcgactcaacttcaagctcttcaacattcaggtcaaagaggttacggacaacaatggagtcaagaccatcgccaataaccttaccagcacggtccaggtcttcacggactcagactatcagctcccgtacgtgctcgggtcggctcacgagggctgcctcccgccgttcccagcggacgttttcatgattcctcagtacgggtatctgacgcttaatgatggaagccaggccgtgggtcgttcgtccttttactgcctggaatatttcccgtcgcaaatgctaagaacgggtaacaacttccagttcagctacgagtttgagaacgtacctttccatagcagctacgctcacagccaaagcctggaccgactaatgaatccactcatcgaccaatacttgtactatctctcaaagactattaacggttctggacagaatcaacaaacgctaaaattcagtgtggccggacccagcaacatggctgtccagggaagaaactacatacctggacccagctaccgacaacaacgtgtctcaaccactgtgactcaaaacaacaacagcgaatttgcttggcctggagcttcttcttgggctctcaatggacgtaatagcttgatgaatcctggacctgctatggccagccacaaagaaggagaggaccgtttctttcctttgtctggatctttaatttttggcaaacaaggaactggaagagacaacgtggatgcggacaaagtcatgataaccaacgaagaagaaattaaaactactaacccggtagcaacggagtcctatggacaagtggccacaaaccacacctcggcccgggcacaggcgcagaccggctgggttcaaaaccaaggaatacttccgggtatggtttggcaggacagagatgtgtacctgcaaggacccatttgggccaaaattcctcacacggacggcaactttcacccttctccgctgatgggagggtttggaatgaagcacccgcctcctcagatcctcatcaaaaacacacctgtacctgcggatcctccaacggccttcaacaagggcaagctgaactctttcatcacccagtattctactggccaagtcagcgtggagatcgagtgggagctgcagaaggaaaacagcaagcgctggaacccggagatccagtacacttccaactattacaagtctaataatgttgaatttgctgttaatactgaaggtgtatatagtgaaccccgccccattggcaccagatacctgactcgtaatctg

SEQ ID NO: 672 - protein, 736 aa, synthetic construct
  REGION 1..736: note = Adeno Associated Virus Capsid Protein Variant
MAADGYLPDWLEDNLSEGIREWWALKPGAPQPKANQQHQDNARGLVLPGYKYLGPGNGLDKGEPVNAADAAALEHDKAYDQQLKAGDNPYLKYNHADAEFQERLKEDTSFGGNLGRAVFQAKKRLLEPLGLVEEAAKTAPGKKRPVEQSPQEPDSSAGIGKSGAQPAKKRLNFGQTGDTESVPDPQPIGEPPAAPSGVGSLTMASGGGAPVADNNEGADGVGSSSGNWHCDSQWLGDRVITTSTRTWALPTYNNHLYKQISNSTSGGSSNDNAYFGYSTPWGYFDFNRFHCHFSPRDWQRLINNNWGFRPKRLNFKLFNIQVKEVTDNNGVKTIANNLTSTVQVFTDSDYQLPYVLGSAHEGCLPPFPADVFMIPQYGYLTLNDGSQAVGRSSFYCLEYFPSQMLRTGNNFQFSYEFENVPFHSSYAHSQSLDRLMNPLIDQYLYYLSKTINGSGQNQQTLKFSVAGPSNMAVQGRNYIPGPSYRQQRVSTTVTQNNNSEFAWPGASSWALNGRNSLMNPGPAMASHKEGEDRFFPLSGSLIFGKQGTGRDNVDADKVMITNEEEIKTTNPVATESYGQVATNHTSARAQAQTGWVQNQGILPGMVWQDRDVYLQGPIWAKIPHTDGNFHPSPLMGGFGMKHPPPQILIKNTPVPADPPTAFNKGKLNSFITQYSTGQVSVEIEWELQKENSKRWNPEIQYTSNYYKSNNVEFAVNTEGVYSEPRPIGTRYLTRNL

SEQ ID NO: 673 - DNA, 2208 bp, synthetic construct
  misc_feature 1..2208: note = Adeno Associated Virus Capsid Protein Variant
  source 1..2208: mol_type = other DNA
atggctgccgatggttatcttccagattggctcgaggacaaccttagtgaaggaattcgcgagtggtgggctttgaaacctggagcccctcaacccaaggcaaatcaacaacatcaagacaacgctcgaggtcttgtgcttccgggttacaaataccttggacccggcaacggactcgacaagggggagccggtcaacgcagcagacgcggcggccctcgagcacgacaaggcctacgaccagcagctcaaggccggagacaacccgtacctcaagtacaaccacgccgacgccgagttccaggagcggctcaaagaagatacgtcttttgggggcaacctcgggcgagcagtcttccaggccaaaaagaggcttcttgaacctcttggtctggttgaggaagcggctaagacggctcctggaaagaagaggcctgtagagcagtctcctcaggaaccggactcctccgcgggtattggcaaatcgggtgcacagcccgctaaaaagagactcaatttcggtgatactggcgacacagagtcagtcccagaccctcaaccaatcggagaacctcccgcagccccctcaggtgtgggatctcttacaatggcttcaggtggtggcgcaccagtggcagacaataacgaaggtgccgatggagtgggtagttcctcgggaaattggcattgcgattcccaatggctgggggacagagtcatcaccaccagcacccgaacctgggccctgcccacctacaacaatcacctctacaagcaaatctccaacagcacatctggaggatcttcaaatgacaacgcctacttcggctacagcaccccctgggggtattttgacttcaacagattccactgccacttctcaccacgtgactggcagcgactcatcaacaacaactggggattccggcctaagcgactcaacttcaagctcttcaacattcaggtcaaagaggttacggacaacaatggagtcaagaccatcgccaataaccttaccagcacggtccaggtcttcacggactcagactatcagctcccgtacgtgctcgggtcggctcacgagggctgcctcccgccgttcccagcggacgttttcatgattcctcagtacgggtatctgacgcttaatgatggaagccaggccgtgggtcgttcgtccttttactgcctggaatatttcccgtcgcaaatgctaagaacgggtaacaacttccagttcagctacgagtttgagaacgtacctttccatagcagctacgctcacagccaaagcctggaccgactaatgaatccactcatcgaccaatacttgtactatctctcaaagactattaacggttctggacagaatcaacaaacgctaaaattcagtgtggccggacccagcaacatggctgtccagggaagaaactacatacctggacccagctaccgacaacaacgtgtctcaaccactgtgactcaaaacaacaacagcgaatttgcttggcctggagcttcttcttgggctctcaatggacgtaatagcttgatgaatcctggacctgctatggccagccacaaagaaggagaggaccgtttctttcctttgtctggatctttaatttttggcaaacaaggaactggaagagacaacgtggatgcggacaaagtcatgataaccaacgaagaagaaattaaaactactaacccggtagcaacggagtcctatggacaagtggccacaaaccaccagagtgcccgggcacaggcgcagaccggctgggttcaaaaccaaggaatacttccgggtatggtttggcaggacagagatgtgtacctgcaaggacccatttgggccaaaattcctcacacggacggcaactttcacccttctccgctgatgggagggtttggaatgaagcacccgcctcctcagatcctcatcaaaaacacacctgtacctgcggatcctccaacggccttcaacaagggcaagctgaactctttcatcacccagtattctactggccaagtcagcgtggagatcgagtgggagctgcagaaggaaaacagcaagcgctggaacccggagatccagtacacttccaactattacaagtctaataatgttgaatttgctgttaatactgaaggtgtatatagtgaaccccgccccattggcaccagatacctgactcgtaatctg

SEQ ID NO: 674 - protein, 736 aa, synthetic construct
  REGION 1..736: note = Adeno Associated Virus Capsid Protein Variant
MAADGYLPDWLEDNLSEGIREWWALKPGAPQPKANQQHQDNARGLVLPGYKYLGPGNGLDKGEPVNAADAAALEHDKAYDQQLKAGDNPYLKYNHADAEFQERLKEDTSFGGNLGRAVFQAKKRLLEPLGLVEEAAKTAPGKKRPVEQSPQEPDSSAGIGKSGAQPAKKRLNFGDTGDTESVPDPQPIGEPPAAPSGVGSLTMASGGGAPVADNNEGADGVGSSSGNWHCDSQWLGDRVITTSTRTWALPTYNNHLYKQISNSTSGGSSNDNAYFGYSTPWGYFDFNRFHCHFSPRDWQRLINNNWGFRPKRLNFKLFNIQVKEVTDNNGVKTIANNLTSTVQVFTDSDYQLPYVLGSAHEGCLPPFPADVFMIPQYGYLTLNDGSQAVGRSSFYCLEYFPSQMLRTGNNFQFSYEFENVPFHSSYAHSQSLDRLMNPLIDQYLYYLSKTINGSGQNQQTLKFSVAGPSNMAVQGRNYIPGPSYRQQRVSTTVTQNNNSEFAWPGASSWALNGRNSLMNPGPAMASHKEGEDRFFPLSGSLIFGKQGTGRDNVDADKVMITNEEEIKTTNPVATESYGQVATNHQSARAQAQTGWVQNQGILPGMVWQDRDVYLQGPIWAKIPHTDGNFHPSPLMGGFGMKHPPPQILIKNTPVPADPPTAFNKGKLNSFITQYSTGQVSVEIEWELQKENSKRWNPEIQYTSNYYKSNNVEFAVNTEGVYSEPRPIGTRYLTRNL

SEQ ID NO: 675 - DNA, 2208 bp, synthetic construct
  misc_feature 1..2208: note = Adeno Associated Virus Capsid Protein Variant
  source 1..2208: mol_type = other DNA
atggctgccgatggttatcttccagattggctcgaggacaaccttagtgaaggaattcgcgagtggtgggctttgaaacctggagcccctcaacccaaggcaaatcaacaacatcaagacaacgctcgaggtcttgtgcttccgggttacaaataccttggacccggcaacggactcgacaagggggagccggtcaacgcagcagacgcggcggccctcgagcacgacaaggcctacgaccagcagctcaaggccggagacaacccgtacctcaagtacaaccacgccgacgccgagttccaggagcggctcaaagaagatacgtcttttgggggcaacctcgggcgagcagtcttccaggccaaaaagaggcttcttgaacctcttggtctggttgaggaagcggctaagacggctcctggaaagaagaggcctgtagagcagtctcctcaggaaccggactcctgggcgggtattggcaaatcgggtgcacagcccgctaaaaagagactcaatttcggtcagactggcgacacagagtcagtcccagaccctcaaccaatcggagaacctcccgcagccccctcaggtgtgggatctcttacaatggcttcaggtggtggcgcaccagtggcagacaataacgaaggtgccgatggagtgggtagttcctcgggaaattggcattgcgattcccaatggctgggggacagagtcatcaccaccagcacccgaacctgggccctgcccacctacaacaatcacctctacaagcaaatctccaacagcacatctggaggatcttcaaatgacaacgcctacttcggctacagcaccccctgggggtattttgacttcaacagattccactgccacttctcaccacgtgactggcagcgactcatcaacaacaactggggattccggcctaagcgactcaacttcaagctcttcaacattcaggtcaaagaggttacggacaacaatggagtcaagaccatcgccaataaccttaccagcacggtccaggtcttcacggactcagactatcagctcccgtacgtgctcgggtcggctcacgagggctgcctcccgccgttcccagcggacgttttcatgattcctcagtacgggtatctgacgcttaatgatggaagccaggccgtgggtcgttcgtccttttactgcctggaatatttcccgtcgcaaatgctaagaacgggtaacaacttccagttcagctacgagtttgagaacgtacctttccatagcagctacgctcacagccaaagcctggaccgactaatgaatccactcatcgaccaatacttgtactatctctcaaagactattaacggttctggacagaatcaacaaacgctaaaattcagtgtggccggacccagcaacatggctgtccagggaagaaactacatacctggacccagctaccgacaacaacgtgtctcaaccactgtgactcaaaacaacaacagcgaatttgcttggcctggagcttcttcttgggctctcaatggacgtaatagcttgatgaatcctggacctgctatggccagccacaaagaaggagaggaccgtttctttcctttgtctggatctttaatttttggcaaacaaggaactggaagagacaacgtggatgcggacaaagtcatgataaccaacgaagaagaaattaaaactactaacccggtagcaacggagtcctatggacaagtggccacaaaccaccagagtgcccgggcacaggcgcagaccggctgggttcaaaaccaaggaatacttccgggtatggtttggcaggacagagatgtgtacctgcaaggacccatttgggccaaaattcctcacacggacggcaactttcacccttctccgctgatgggagggtttggaatgaagcacccgcctcctcagatcctcatcaaaaacacacctgtacctgcggatcctccaacggccttcaacaagggcaagctgaactctttcatcacccagtattctactggccaagtcagcgtggagatcgagtgggagctgcagaaggaaaacagcaagcgctggaacccggagatccagtacacttccaactattacaagtctaataatgttgaatttgctgttaatactgaaggtgtatatagtgaaccccgccccattggcaccagatacctgactcgtaatctg

SEQ ID NO: 676 - protein, 736 aa, synthetic construct
  REGION 1..736: note = Adeno Associated Virus Capsid Protein Variant
MAADGYLPDWLEDNLSEGIREWWALKPGAPQPKANQQHQDNARGLVLPGYKYLGPGNGLDKGEPVNAADAAALEHDKAYDQQLKAGDNPYLKYNHADAEFQERLKEDTSFGGNLGRAVFQAKKRLLEPLGLVEEAAKTAPGKKRPVEQSPQEPDSWAGIGKSGAQPAKKRLNFGQTGDTESVPDPQPIGEPPAAPSGVGSLTMASGGGAPVADNNEGADGVGSSSGNWHCDSQWLGDRVITTSTRTWALPTYNNHLYKQISNSTSGGSSNDNAYFGYSTPWGYFDFNRFHCHFSPRDWQRLINNNWGFRPKRLNFKLFNIQVKEVTDNNGVKTIANNLTSTVQVFTDSDYQLPYVLGSAHEGCLPPFPADVFMIPQYGYLTLNDGSQAVGRSSFYCLEYFPSQMLRTGNNFQFSYEFENVPFHSSYAHSQSLDRLMNPLIDQYLYYLSKTINGSGQNQQTLKFSVAGPSNMAVQGRNYIPGPSYRQQRVSTTVTQNNNSEFAWPGASSWALNGRNSLMNPGPAMASHKEGEDRFFPLSGSLIFGKQGTGRDNVDADKVMITNEEEIKTTNPVATESYGQVATNHQSARAQAQTGWVQNQGILPGMVWQDRDVYLQGPIWAKIPHTDGNFHPSPLMGGFGMKHPPPQILIKNTPVPADPPTAFNKGKLNSFITQYSTGQVSVEIEWELQKENSKRWNPEIQYTSNYYKSNNVEFAVNTEGVYSEPRPIGTRYLTRNL

SEQ ID NO: 677 - DNA, 2208 bp, synthetic construct
  misc_feature 1..2208: note = Adeno Associated Virus Capsid Protein Variant
  source 1..2208: mol_type = other DNA
atggctgccgatggttatcttccagattggctcgaggacaaccttagtgaaggaattcgcgagtggtgggctttgaaacctggagcccctcaacccaaggcaaatcaacaacatcaagacaacgctcgaggtcttgtgcttccgggttacaaataccttggacccggcaacggactcgacaagggggagccggtcaacgcagcagacgcggcggccctcgagcacgacaaggcctacgaccagcagctcaaggccggagacaacccgtacctcaagtacaaccacgccgacgccgagttccaggagcggctcaaagaagatacgtcttttgggggcaacctcgggcgagcagtcttccaggccaaaaagaggcttcttgaacctcttggtctggttgaggaagcggctaagacggctcctggaaagaagaggcctgtagagcagtctcctcaggaaccggactcctccgcgggtattggcaaatcgggtgcacagcccgctaaaaagagactcaatttcggtcagactggcgacacagagtcagtcccagaccctcaaccaatcggagaacctcccgcagccccctcaggtgtgggatctcttacaatggcttcaggtggtggcgcaccagtggcagacaataacgaaggtgccgatggagtgggtagttcctcgggaaattggcattgcgattcccaatggctgggggacagagtcatcaccaccagcacccgaacctgggccctgcccacctacaacaatcacctctacaagcaaatctccaacagcacatctggaggatcttcaaatgacaacgcctacttcggctacagcaccccctgggggtattttgacttcaacagattccactgccacttctcaccacgtgactggcagcgactcatcaacaacaactggggattccggcctaagcgactcaacttcaagctcttcaacattcaggtcaaagaggttacggacaacaatggagtcaagaccatcgccaataaccttaccagcacggtccaggtcttcacggactcagactatcagctcccgtacgtgctcgggtcggctcacgagggctgcctcccgccgttcccagcggacgttttcatgattcctcagtacgggtatctgacgcttaatgatggaagccaggccgtgggtcgttcgtccttttactgcctggaatatttcccgtcgcaaatgctaagaacgggtaacaacttccagttcagctacgagtttgagaacgtacctttccatagcagctacgctcacagccaaagcctggaccgactaatggtgccactcatcgaccaatacttgtactatctctcaaagactattaacggttctggacagaatcaacaaacgctaaaattcagtgtggccggacccagcaacatggctgtccagggaagaaactacatacctggacccagctaccgacaacaacgtgtctcaaccactgtgactcaaaacaacaacagcgaatttgcttggcctggagcttcttcttgggctctcaatggacgtaatagcttgatgaatcctggacctgctatggccagccacaaagaaggagaggaccgtttctttcctttgtctggatctttaatttttggcaaacaaggaactggaagagacaacgtggatgcggacaaagtcatgataaccaacgaagaagaaattaaaactactaacccggtagcaacggagtcctatggacaagtggccacaaaccaccagagtgcccgggcacaggcgcagaccggctgggttcaaaaccaaggaatacttccgggtatggtttggcaggacagagatgtgtacctgcaaggacccatttgggccaaaattcctcacacggacggcaactttcacccttctccgctgatgggagggtttggaatgaagcacccgcctcctcagatcctcatcaaaaacacacctgtacctgcggatcctccaacggccttcaacaagggcaagctgaactctttcatcacccagtattctactggccaagtcagcgtggagatcgagtgggagctgcagaaggaaaacagcaagcgctggaacccggagatccagtacacttccaactattacaagtctaataatgttgaatttgctgttaatactgaaggtgtatatagtgaaccccgccccattggcaccagatacctgactcgtaatctg

SEQ ID NO: 678 - protein, 736 aa, synthetic construct
  REGION 1..736: note = Adeno Associated Virus Capsid Protein Variant
MAADGYLPDWLEDNLSEGIREWWALKPGAPQPKANQQHQDNARGLVLPGYKYLGPGNGLDKGEPVNAADAAALEHDKAYDQQLKAGDNPYLKYNHADAEFQERLKEDTSFGGNLGRAVFQAKKRLLEPLGLVEEAAKTAPGKKRPVEQSPQEPDSSAGIGKSGAQPAKKRLNFGQTGDTESVPDPQPIGEPPAAPSGVGSLTMASGGGAPVADNNEGADGVGSSSGNWHCDSQWLGDRVITTSTRTWALPTYNNHLYKQISNSTSGGSSNDNAYFGYSTPWGYFDFNRFHCHFSPRDWQRLINNNWGFRPKRLNFKLFNIQVKEVTDNNGVKTIANNLTSTVQVFTDSDYQLPYVLGSAHEGCLPPFPADVFMIPQYGYLTLNDGSQAVGRSSFYCLEYFPSQMLRTGNNFQFSYEFENVPFHSSYAHSQSLDRLMVPLIDQYLYYLSKTINGSGQNQQTLKFSVAGPSNMAVQGRNYIPGPSYRQQRVSTTVTQNNNSEFAWPGASSWALNGRNSLMNPGPAMASHKEGEDRFFPLSGSLIFGKQGTGRDNVDADKVMITNEEEIKTTNPVATESYGQVATNHQSARAQAQTGWVQNQGILPGMVWQDRDVYLQGPIWAKIPHTDGNFHPSPLMGGFGMKHPPPQILIKNTPVPADPPTAFNKGKLNSFITQYSTGQVSVEIEWELQKENSKRWNPEIQYTSNYYKSNNVEFAVNTEGVYSEPRPIGTRYLTRNL

SEQ ID NO: 679 - DNA, 2208 bp, synthetic construct
  misc_feature 1..2208: note = Adeno Associated Virus Capsid Protein Variant
  source 1..2208: mol_type = other DNA
atggctgccgatggttatcttccagattggctcgaggacaaccttagtgaaggaattcgcgagtggtgggctttgaaacctggagcccctcaacccaaggcaaatcaacaacatcaagacaacgctcgaggtcttgtgcttccgggttacaaataccttggacccggcaacggactcgacaagggggagccggtcaacgcagcagacgcggcggccctcgagcacgacaaggcctacgaccagcagctcaaggccggagacaacccgtacctcaagtacaaccacgccgacgccgagttccaggagcggctcaaagaagatacgtcttttgggggcaacctcgggcgagcagtcttccaggccaaaaagaggcttcttgaacctcttggtctggttgaggaagcggctaagacggctcctggaaagaagaggcctgtagagcagtctcctcaggaaccggactcctcctgtggtattggcaaatcgggtgcacagcccgctaaaaagagactcaatttcggtcagactggcgacacagagtcagtcccagaccctcaaccaatcggagaacctcccgcagccccctcaggtgtgggatctcttacaatggcttcaggtggtggcgcaccagtggcagacaataacgaaggtgccgatggagtgggtagttcctcgggaaattggcattgcgattcccaatggctgggggacagagtcatcaccaccagcacccgaacctgggccctgcccacctacaacaatcacctctacaagcaaatctccaacagcacatctggaggatcttcaaatgacaacgcctacttcggctacagcaccccctgggggtattttgacttcaacagattccactgccacttctcaccacgtgactggcagcgactcatcaacaacaactggggattccggcctaagcgactcaacttcaagctcttcaacattcaggtcaaagaggttacggacaacaatggagtcaagaccatcgccaataaccttaccagcacggtccaggtcttcacggactcagactatcagctcccgtacgtgctcgggtcggctcacgagggctgcctcccgccgttcccagcggacgttttcatgattcctcagtacgggtatctgacgcttaatgatggaagccaggccgtgggtcgttcgtccttttactgcctggaatatttcccgtcgcaaatgctaagaacgggtaacaacttccagttcagctacgagtttgagaacgtacctttccatagcagctacgctcacagccaaagcctggaccgactaatgaatccactcatcgaccaatacttgtactatctctcaaagactattaacggttctggacagaatcaacaaacgctaaaattcagtgtggccggacccagcaacatggctgtccagggaagaaactacatacctggacccagctaccgacaacaacgtgtctcaaccactgtgactcaaaacaacaacagcgaatttgcttggcctggagcttcttcttgggctctcaatggacgtaatagcttgatgaatcctggacctgctatggccagccacaaagaaggagaggaccgtttctttcctttgtctggatctttaatttttggcaaacaaggaactggaagagacaacgtggatgcggacaaagtcatgataaccaacgaagaagaaattaaaactactaacccggtagcaacggagtcctatggacaagtggccacaaaccaccagagtgcccgggcacaggcgcagaccggctgggttcaaaaccaaggaatacttccgggtatggtttggcaggacagagatgtgtacctgcaaggacccatttgggccaaaattcctcacacggacggcaactttcacccttctccgctgatgggagggtttggaatgaagcacccgcctcctcagatcctcatcaaaaacacacctgtacctgcggatcctccaacggccttcaacaagggcaagctgaactctttcatcacccagtattctactggccaagtcagcgtggagatcgagtgggagctgcagaaggaaaacagcaagcgctggaacccggagatccagtacacttccaactattacaagtctaataatgttgaatttgctgttaatactgaaggtgtatatagtgaaccccgccccattggcaccagatacctgactcgtaatctg

SEQ ID NO: 680 - protein, 736 aa, synthetic construct
  REGION 1..736: note = Adeno Associated Virus Capsid Protein Variant
MAADGYLPDWLEDNLSEGIREWWALKPGAPQPKANQQHQDNARGLVLPGYKYLGPGNGLDKGEPVNAADAAALEHDKAYDQQLKAGDNPYLKYNHADAEFQERLKEDTSFGGNLGRAVFQAKKRLLEPLGLVEEAAKTAPGKKRPVEQSPQEPDSSCGIGKSGAQPAKKRLNFGQTGDTESVPDPQPIGEPPAAPSGVGSLTMASGGGAPVADNNEGADGVGSSSGNWHCDSQWLGDRVITTSTRTWALPTYNNHLYKQISNSTSGGSSNDNAYFGYSTPWGYFDFNRFHCHFSPRDWQRLINNNWGFRPKRLNFKLFNIQVKEVTDNNGVKTIANNLTSTVQVFTDSDYQLPYVLGSAHEGCLPPFPADVFMIPQYGYLTLNDGSQAVGRSSFYCLEYFPSQMLRTGNNFQFSYEFENVPFHSSYAHSQSLDRLMNPLIDQYLYYLSKTINGSGQNQQTLKFSVAGPSNMAVQGRNYIPGPSYRQQRVSTTVTQNNNSEFAWPGASSWALNGRNSLMNPGPAMASHKEGEDRFFPLSGSLIFGKQGTGRDNVDADKVMITNEEEIKTTNPVATESYGQVATNHQSARAQAQTGWVQNQGILPGMVWQDRDVYLQGPIWAKIPHTDGNFHPSPLMGGFGMKHPPPQILIKNTPVPADPPTAFNKGKLNSFITQYSTGQVSVEIEWELQKENSKRWNPEIQYTSNYYKSNNVEFAVNTEGVYSEPRPIGTRYLTRNL

SEQ ID NO: 681 - DNA, 2208 bp, synthetic construct
  misc_feature 1..2208: note = Adeno Associated Virus Capsid Protein Variant
  source 1..2208: mol_type = other DNA
atggctgccgatggttatcttccagattggctcgaggacaaccttagtgaaggaattcgcgagtggtgggctttgaaacctggagcccctcaacccaaggcaaatcaacaacatcaagacaacgctcgaggtcttgtgcttccgggttacaaataccttggacccggcaacggactcgacaagggggagccggtcaacgcagcagacgcggcggccctcgagcacgacaaggcctacgaccagcagctcaaggccggagacaacccgtacctcaagtacaaccacgccgacgccgagttccaggagcggctcaaagaagatacgtcttttgggggcaacctcgggcgagcagtcttccaggccaaaaagaggcttcttgaacctcttggtctggttgaggaagcggctaagacggctcctggaaagaagaggcctgtagagcagtctcctcaggaaccggactcctccgcgggtattggcaaatcgggtgcacagcccgctaaaaagagactcaatttcggtcagactggcgacacagagtcagtcccagaccctcaaccaatcggagaacctcccgcagccccctcaggtgtgggatctcttacaatggcttcaggtggtggcgcaccagtggcagacaataacgaaggtgccgatggagtgggtagttcctcgggaaattggcattgcgattcccaatggctgggggacagagtcatcaccaccagcacccgaacctgggccctgcccacctacaacaatcacctctacaagcaaatctccaacagcacatctggaggatcttcaaatgacaacgcctacttcggctacagcaccccctgggggtattttgacttcaacagattccactgccacttctcaccacgtgactggcagcgactcatcaacaacaactggggattccggcctaagcgactcaacttcaagctcttcaacattcaggtcaaagaggttacggacaacaatggagtcaagaccatcgccaataaccttaccagcacggtccaggtcttcacggactcagactatcagctcccgtacgtgctcgggtcggctcacgagggctgcctcccgccgttcccagcggacgttttcatgattcctcagtacgggtatctgacgcttaatgatggaagccaggccgtgggtcgttcgtccttttactgcctggaatatttcccgtcgcaaatgctaagaacgggtaacaacttccagttcagctacgagtttgagaacgtacctttccatagcagctacgctcacagccaaagcctggaccgactaatgaatccactcatcgaccaatacttgtactatctctcaaagactattaacggttctggacagaatcaacaaacgctaaaattcagtgtggccggacccagcaacatggctgtccagggaagaaactacatacctggacccagctaccgacaacaacgtgtctcaaccactgtgactcaaaacaacaacagcgaatttgcttggcctggagcttcttcttgggctctcttgggacgtaatagcttgatgaatcctggacctgctatggccagccacaaagaaggagaggaccgtttctttcctttgtctggatctttaatttttggcaaacaaggaactggaagagacaacgtggatgcggacaaagtcatgataaccaacgaagaagaaattaaaactactaacccggtagcaacggagtcctatggacaagtggccacaaaccaccagagtgcccgggcacaggcgcagaccggctgggttcaaaaccaaggaatacttccgggtatggtttggcaggacagagatgtgtacctgcaaggacccatttgggccaaaattcctcacacggacggcaactttcacccttctccgctgatgggagggtttggaatgaagcacccgcctcctcagatcctcatcaaaaacacacctgtacctgcggatcctccaacggccttcaacaagggcaagctgaactctttcatcacccagtattctactggccaagtcagcgtggagatcgagtgggagctgcagaaggaaaacagcaagcgctggaacccggagatccagtacacttccaactattacaagtctaataatgttgaatttgctgttaatactgaaggtgtatatagtgaaccccgccccattggcaccagatacctgactcgtaatctg

SEQ ID NO: 682 - protein, 736 aa, synthetic construct
  REGION 1..736: note = Adeno Associated Virus Capsid Protein Variant
MAADGYLPDWLEDNLSEGIREWWALKPGAPQPKANQQHQDNARGLVLPGYKYLGPGNGLDKGEPVNAADAAALEHDKAYDQQLKAGDNPYLKYNHADAEFQERLKEDTSFGGNLGRAVFQAKKRLLEPLGLVEEAAKTAPGKKRPVEQSPQEPDSSAGIGKSGAQPAKKRLNFGQTGDTESVPDPQPIGEPPAAPSGVGSLTMASGGGAPVADNNEGADGVGSSSGNWHCDSQWLGDRVITTSTRTWALPTYNNHLYKQISNSTSGGSSNDNAYFGYSTPWGYFDFNRFHCHFSPRDWQRLINNNWGFRPKRLNFKLFNIQVKEVTDNNGVKTIANNLTSTVQVFTDSDYQLPYVLGSAHEGCLPPFPADVFMIPQYGYLTLNDGSQAVGRSSFYCLEYFPSQMLRTGNNFQFSYEFENVPFHSSYAHSQSLDRLMNPLIDQYLYYLSKTINGSGQNQQTLKFSVAGPSNMAVQGRNYIPGPSYRQQRVSTTVTQNNNSEFAWPGASSWALLGRNSLMNPGPAMASHKEGEDRFFPLSGSLIFGKQGTGRDNVDADKVMITNEEEIKTTNPVATESYGQVATNHQSARAQAQTGWVQNQGILPGMVWQDRDVYLQGPIWAKIPHTDGNFHPSPLMGGFGMKHPPPQILIKNTPVPADPPTAFNKGKLNSFITQYSTGQVSVEIEWELQKENSKRWNPEIQYTSNYYKSNNVEFAVNTEGVYSEPRPIGTRYLTRNL

SEQ ID NO: 683 - DNA, 2208 bp, synthetic construct
  misc_feature 1..2208: note = Adeno Associated Virus Capsid Protein Variant
  source 1..2208: mol_type = other DNA
atggctgccgatggttatcttccagattggctcgaggacaaccttagtgaaggaattcgcgagtggtgggctttgaaacctggagcccctcaacccaaggcaaatcaacaacatcaagacaacgctcgaggtcttgtgcttccgggttacaaataccttggacccggcaacggactcgacaagggggagccggtcaacgcagcagacgcggcggccctcgagcacgacaaggcctacgaccagcagctcaaggccggagacaacccgtacctcaagtacaaccacgccgacgccgagttccaggagcggctcaaagaagatacgtcttttgggggcaacctcgggcgagcagtcttccaggccaaaaagaggcttcttgaacctcttggtctggttgaggaagcggctaagacggctcctggaaagaagaggcctgtagagcagtctcctcaggaaccggactcctccgcgggtattggcaaatcgggtgcacagcccgctaaaaagagactcaatttcggtcagactggcgacacagagtcagtcccagaccctcaaccaatcggagaacctcccgcagccccctcaggtgtgggatctcttacaatggcttcaggtggtggcgcaccagtggcagacaataacgaaggtgccgatggagtgggtagttcctcgggaaattggcattgcgattcccaatggctgggggacagagtcatcaccaccagcacccgaacctgggccctgcccacctacaacaatcacctctacaagcaaatctccaacagcacatctggaggatcttcaaatgacaacgcctacttcggctacagcaccccctgggggtattttgacttcaacagattccactgccacttctcaccacgtgactggcagcgactcatcaacaacaactggggattccggcctaagcgactcaacttcaagctcttcaacattcaggtcaaagaggttacggacaacaatggagtcaagaccatcgccaataaccttaccagcacggtccaggtcttcacggactcagactatcagctcccgtacgtgctcgggtcggctcacgagggctgcctcccgccgttcccagcggacgttttcatgattcctcagtacgggtatctgacgcttaatgatggaagccaggccgtgggtcgttcgtccttttactgcctggaatatttcccgtcgcaaatgctaagaacgggtaacaacttccagttcagctacgagtttgagaacgtacctttccatagcagctacgctcacagccaaagcctggaccgactaatgaatccactcatcgaccaatacttgtactatctctcaaagactattaacggttctggacagaatcaacaaacgctaaaattcagtgtggccggacccagcaacatggctgtccagggaagaaactacatacctggacccagctaccgacaacaacgtgtctcaaccactgtgactcaaaacaacaacagcgaatttgcttggcctggagcttcttcttgggctctcaatggacgtaatagcttgatgaatcctggacctgctatggccagccacaaagaaggagaggaccgtttctttcctttgtctggatctttaatttttggcaaacaaggaactggaagagacaacgtggatgcggacaaagtcatgataaccaacgaagaagaaattaaaactactaacccggtagcaacggagtcctatggacaagtggccacaaaccaccagagtgcccgggcacaggcgcagaccggctgggttcaagggcaaggaatacttccgggtatggtttggcaggacagagatgtgtacctgcaaggacccatttgggccaaaattcctcacacggacggcaactttcacccttctccgctgatgggagggtttggaatgaagcacccgcctcctcagatcctcatcaaaaacacacctgtacctgcggatcctccaacggccttcaacaagggcaagctgaactctttcatcacccagtattctactggccaagtcagcgtggagatcgagtgggagctgcagaaggaaaacagcaagcgctggaacccggagatccagtacacttccaactattacaagtctaataatgttgaatttgctgttaatactgaaggtgtatatagtgaaccccgccccattggcaccagatacctgactcgtaatctg

SEQ ID NO: 684 - protein, 736 aa, synthetic construct
  REGION 1..736: note = Adeno Associated Virus Capsid Protein Variant
MAADGYLPDWLEDNLSEGIREWWALKPGAPQPKANQQHQDNARGLVLPGYKYLGPGNGLDKGEPVNAADAAALEHDKAYDQQLKAGDNPYLKYNHADAEFQERLKEDTSFGGNLGRAVFQAKKRLLEPLGLVEEAAKTAPGKKRPVEQSPQEPDSSAGIGKSGAQPAKKRLNFGQTGDTESVPDPQPIGEPPAAPSGVGSLTMASGGGAPVADNNEGADGVGSSSGNWHCDSQWLGDRVITTSTRTWALPTYNNHLYKQISNSTSGGSSNDNAYFGYSTPWGYFDFNRFHCHFSPRDWQRLINNNWGFRPKRLNFKLFNIQVKEVTDNNGVKTIANNLTSTVQVFTDSDYQLPYVLGSAHEGCLPPFPADVFMIPQYGYLTLNDGSQAVGRSSFYCLEYFPSQMLRTGNNFQFSYEFENVPFHSSYAHSQSLDRLMNPLIDQYLYYLSKTINGSGQNQQTLKFSVAGPSNMAVQGRNYIPGPSYRQQRVSTTVTQNNNSEFAWPGASSWALNGRNSLMNPGPAMASHKEGEDRFFPLSGSLIFGKQGTGRDNVDADKVMITNEEEIKTTNPVATESYGQVATNHQSARAQAQTGWVQGQGILPGMVWQDRDVYLQGPIWAKIPHTDGNFHPSPLMGGFGMKHPPPQILIKNTPVPADPPTAFNKGKLNSFITQYSTGQVSVEIEWELQKENSKRWNPEIQYTSNYYKSNNVEFAVNTEGVYSEPRPIGTRYLTRNL

SEQ ID NO: 685 - DNA, 2208 bp, synthetic construct
  misc_feature 1..2208: note = Adeno Associated Virus Capsid Protein Variant
  source 1..2208: mol_type = other DNA
atggctgccgatggttatcttccagattggctcgaggacaaccttagtgaaggaattcgcgagtggtgggctttgaaacctggagcccctcaacccaaggcaaatcaacaacatcaagacaacgctcgaggtcttgtgcttccgggttacaaataccttggacccggcaacggactcgacaagggggagccggtcaacgcagcagacgcggcggccctcgagcacgacaaggcctacgaccagcagctcaaggccggagacaacccgtacctcaagtacaaccacgccgacgccgagttccaggagcggctcaaagaagatacgtcttttgggggcaacctcgggcgagcagtcttccaggccaaaaagaggcttcttgaacctcttggtctggttgaggaagcggctaagacggctcctggaaagaagaggcctgtagagcagtctcctcaggaaccggactcctccgcgggtattggcaaatcgggtgcacagcccgctaaaaagagactcaatttcggtcagactggcgacacagagtcagtcccagaccctcaaccaatcggagaacctcccgcagccccctcaggtgtgggatctcttacaatggcttcaggtggtggcgcaccagtggcagacaataacgaaggtgccgatggagtgggtagttcctcgggaaattggcattgcgattcccaatggctgggggacagagtcatcaccaccagcacccgaacctgggccctgcccacctacaacaatcacctctacaagcaaatctccaacagcacatctggaggatcttcaaatgacaacgcctacttcggctacagcaccccctgggggtattttgacttcaacagattccactgccacttctcaccacgtgactggcagcgactcatcaacaacaactggggattccggcctaagcgactcaacttcaagctcttcaacattcaggtcaaagaggttacggacaacaatggagtcaagaccatcgccaataaccttaccagcacggtccaggtcttcacggactcagactatcagctcccgtacgtgctcgggtcggctcacgagggctgcctcccgccgttcccagcggacgttttcatgattcctcagtacgggtatctgacgcttaatgatggaagccaggccgtgggtcgttcgtccttttactgcctggaatatttcccgtcgcaaatgctaagaacgggtaacaacttccagttcagctacgagtttgagaacgtacctttccatagcagctacgctcacagccaaagcctggaccgactaatgaatccactcatcgaccaatacttgtactatctctcaacgactattaacggttctggacagaatcaacaaacgctaaaattcagtgtggccggacccagcaacatggctgtccagggaagaaactacatacctggacccagctaccgacaacaacgtgtctcaaccactgtgactcaaaacaacaacagcgaatttgcttggcctggagcttcttcttgggctctcaatggacgtaatagcttgatgaatcctggacctgctatggccagccacaaagaaggagaggaccgtttctttcctttgtctggatctttaatttttggcaaacaaggaactggaagagacaacgtggatgcggacaaagtcatgataaccaacgaagaagaaattaaaactactaacccggtagcaacggagtcctatggacaagtggccacaaaccaccagagtgcccgggcacaggcgcagaccggctgggttcaaaaccaaggaatacttccgggtatggtttggcaggacagagatgtgtacctgcaaggacccatttgggccaaaattcctcacacggacggcaactttcacccttctccgctgatgggagggtttggaatgaagcacccgcctcctcagatcctcatcaaaaacacacctgtacctgcggatcctccaacggccttcaacaagggcaagctgaactctttcatcacccagtattctactggccaagtcagcgtggagatcgagtgggagctgcagaaggaaaacagcaagcgctggaacccggagatccagtacacttccaactattacaagtctaataatgttgaatttgctgttaatactgaaggtgtatatagtgaaccccgccccattggcaccagatacctgactcgtaatctg

SEQ ID NO: 686 - protein, 736 aa, synthetic construct
  REGION 1..736: note = Adeno Associated Virus Capsid Protein Variant
MAADGYLPDWLEDNLSEGIREWWALKPGAPQPKANQQHQDNARGLVLPGYKYLGPGNGLDKGEPVNAADAAALEHDKAYDQQLKAGDNPYLKYNHADAEFQERLKEDTSFGGNLGRAVFQAKKRLLEPLGLVEEAAKTAPGKKRPVEQSPQEPDSSAGIGKSGAQPAKKRLNFGQTGDTESVPDPQPIGEPPAAPSGVGSLTMASGGGAPVADNNEGADGVGSSSGNWHCDSQWLGDRVITTSTRTWALPTYNNHLYKQISNSTSGGSSNDNAYFGYSTPWGYFDFNRFHCHFSPRDWQRLINNNWGFRPKRLNFKLFNIQVKEVTDNNGVKTIANNLTSTVQVFTDSDYQLPYVLGSAHEGCLPPFPADVFMIPQYGYLTLNDGSQAVGRSSFYCLEYFPSQMLRTGNNFQFSYEFENVPFHSSYAHSQSLDRLMNPLIDQYLYYLSTTINGSGQNQQTLKFSVAGPSNMAVQGRNYIPGPSYRQQRVSTTVTQNNNSEFAWPGASSWALNGRNSLMNPGPAMASHKEGEDRFFPLSGSLIFGKQGTGRDNVDADKVMITNEEEIKTTNPVATESYGQVATNHQSARAQAQTGWVQNQGILPGMVWQDRDVYLQGPIWAKIPHTDGNFHPSPLMGGFGMKHPPPQILIKNTPVPADPPTAFNKGKLNSFITQYSTGQVSVEIEWELQKENSKRWNPEIQYTSNYYKSNNVEFAVNTEGVYSEPRPIGTRYLTRNL

SEQ ID NO: 687 - DNA, 2208 bp, synthetic construct
  misc_feature 1..2208: note = Adeno Associated Virus Capsid Protein Variant
  source 1..2208: mol_type = other DNA
atggctgccgatggttatcttccagattggctcgaggacaaccttagtgaaggaattcgcgagtggtgggctttgaaacctggagcccctcaacccaaggcaaatcaacaacatcaagacaacgctcgaggtcttgtgcttccgggttacaaataccttggacccggcaacggactcgacaagggggagccggtcaacgcagcagacgcggcggccctcgagcacgacaaggcctacgaccagcagctcaaggccggagacaacccgtacctcaagtacaaccacgccgacgccgagttccaggagcggctcaaagaagatacgtcttttgggggcaacctcgggcgagcagtcttccaggccaaaaagaggcttcttgaacctcttggtctggttgaggaagcggctaagacggctcctggaaagaagaggcctgtagagcagtctcctcaggaaccggactcctccgcgggtattggcaaatcgggtgcacagcccgctaaaaagagactcaattggggtcagactggcgacacagagtcagtcccagaccctcaaccaatcggagaacctcccgcagccccctcaggtgtgggatctcttacaatggcttcaggtggtggcgcaccagtggcagacaataacgaaggtgccgatggagtgggtagttcctcgggaaattggcattgcgattcccaatggctgggggacagagtcatcaccaccagcacccgaacctgggccctgcccacctacaacaatcacctctacaagcaaatctccaacagcacatctggaggatcttcaaatgacaacgcctacttcggctacagcaccccctgggggtattttgacttcaacagattccactgccacttctcaccacgtgactggcagcgactcatcaacaacaactggggattccggcctaagcgactcaacttcaagctcttcaacattcaggtcaaagaggttacggacaacaatggagtcaagaccatcgccaataaccttaccagcacggtccaggtcttcacggactcagactatcagctcccgtacgtgctcgggtcggctcacgagggctgcctcccgccgttcccagcggacgttttcatgattcctcagtacgggtatctgacgcttaatgatggaagccaggccgtgggtcgttcgtccttttactgcctggaatatttcccgtcgcaaatgctaagaacgggtaacaacttccagttcagctacgagtttgagaacgtacctttccatagcagctacgctcacagccaaagcctggaccgactaatgaatccactcatcgaccaatacttgtactatctctcaaagactattaacggttctggacagaatcaacaaacgctaaaattcagtgtggccggacccagcaacatggctgtccagggaagaaactacatacctggacccagctaccgacaacaacgtgtctcaaccactgtgactcaaaacaacaacagcgaatttgcttggcctggagcttcttcttgggctctcaatggacgtaatagcttgatgaatcctggacctgctatggccagccacaaagaaggagaggaccgtttctttcctttgtctggatctttaatttttggcaaacaaggaactggaagagacaacgtggatgcggacaaagtcatgataaccaacgaagaagaaattaaaactactaacccggtagcaacggagtcctatggacaagtggccacaaaccaccagagtgcccgggcacaggcgcagaccggctgggttcaaaaccaaggaatacttccgggtatggtttggcaggacagagatgtgtacctgcaaggacccatttgggccaaaattcctcacacggacggcaactttcacccttctccgctgatgggagggtttggaatgaagcacccgcctcctcagatcctcatcaaaaacacacctgtacctgcggatcctccaacggccttcaacaagggcaagctgaactctttcatcacccagtattctactggccaagtcagcgtggagatcgagtgggagctgcagaaggaaaacagcaagcgctggaacccggagatccagtacacttccaactattacaagtctaataatgttgaatttgctgttaatactgaaggtgtatatagtgaaccccgccccattggcaccagatacctgactcgtaatctg

SEQ ID NO: 688 - protein, 736 aa, synthetic construct
  REGION 1..736: note = Adeno Associated Virus Capsid Protein Variant
MAADGYLPDWLEDNLSEGIREWWALKPGAPQPKANQQHQDNARGLVLPGYKYLGPGNGLDKGEPVNAADAAALEHDKAYDQQLKAGDNPYLKYNHADAEFQERLKEDTSFGGNLGRAVFQAKKRLLEPLGLVEEAAKTAPGKKRPVEQSPQEPDSSAGIGKSGAQPAKKRLNWGQTGDTESVPDPQPIGEPPAAPSGVGSLTMASGGGAPVADNNEGADGVGSSSGNWHCDSQWLGDRVITTSTRTWALPTYNNHLYKQISNSTSGGSSNDNAYFGYSTPWGYFDFNRFHCHFSPRDWQRLINNNWGFRPKRLNFKLFNIQVKEVTDNNGVKTIANNLTSTVQVFTDSDYQLPYVLGSAHEGCLPPFPADVFMIPQYGYLTLNDGSQAVGRSSFYCLEYFPSQMLRTGNNFQFSYEFENVPFHSSYAHSQSLDRLMNPLIDQYLYYLSKTINGSGQNQQTLKFSVAGPSNMAVQGRNYIPGPSYRQQRVSTTVTQNNNSEFAWPGASSWALNGRNSLMNPGPAMASHKEGEDRFFPLSGSLIFGKQGTGRDNVDADKVMITNEEEIKTTNPVATESYGQVATNHQSARAQAQTGWVQNQGILPGMVWQDRDVYLQGPIWAKIPHTDGNFHPSPLMGGFGMKHPPPQILIKNTPVPADPPTAFNKGKLNSFITQYSTGQVSVEIEWELQKENSKRWNPEIQYTSNYYKSNNVEFAVNTEGVYSEPRPIGTRYLTRNL

SEQ ID NO: 689 - DNA, 2208 bp, synthetic construct
  misc_feature 1..2208: note = Adeno Associated Virus Capsid Protein Variant
  source 1..2208: mol_type = other DNA
atggctgccgatggttatcttccagattggctcgaggacaaccttagtgaaggaattcgcgagtggtgggctttgaaacctggagcccctcaacccaaggcaaatcaacaacatcaagacaacgctcgaggtcttgtgcttccgggttacaaataccttggacccggcaacggactcgacaagggggagccggtcaacgcagcagacgcggcggccctcgagcacgacaaggcctacgaccagcagctcaaggccggagacaacccgtacctcaagtacaaccacgccgacgccgagttccaggagcggctcaaagaagatacgtcttttgggggcaacctcgggcgagcagtcttccaggccaaaaagaggcttcttgaacctcttggtctggttgaggaagcggctaagacggctcctggaaagaagaggcctgtagagcagtctcctcaggaaccggactcctccgcgggtattggcaaatcgggtgcacagcccgctaaaaagagactcaatttcggtcagactggcgacacagagtcagtcccagaccctcaaccaatcggagaacctcccgcagccccctcaggtgtgggatctcttacaatggcttcaggtggtggcgcaccagtggcagacaataacgaaggtgccgatggagtgggtagttcctcgggaaattggcattgcgattcccaatggctgggggacagagtcatcaccaccagcacccgaacctgggccctgcccacctacaacaatcacctctacaagcaaatctccaacagcacatctggaggatcttcaaatgacaacgcctacttcggctacagcaccccctgggggtattttgacttcaacagattccactgccacttctcaccacgtgactggcagcgactcatcaacaacaactggggattccggcctaagcgactcaacttcaagctcttcaacattcaggtcaaagaggttacggacaacaatggagtcaagaccatcgccaataaccttaccagcacggtccaggtcttcacggactcagactatcagctcccgtacgtgctcgggtcggctcacgagggctgcctcccgccgttcccagcggacgttttcatgattcctcagtacgggtatctgacgcttaatgatggaagccaggccgtgggtcgttcgtccttttactgcctggaatatttcccgtcgcaaatgctaagaacgggtaacaacttccagttcagctacgagtttgagaacgtacctttccatagcagctacgctcacagccaaagcctggaccgactaatgaatccactcatcgaccaatacttgtactatctctcaaagactattaacggttctggacagaatcaacaaacgctaaaattcagtgtggccggacccagcaacatgcaggtccagggaagaaactacatacctggacccagctaccgacaacaacgtgtctcaaccactgtgactcaaaacaacaacagcgaatttgcttggcctggagcttcttcttgggctctcaatggacgtaatagcttgatgaatcctggacctgctatggccagccacaaagaaggagaggaccgtttctttcctttgtctggatctttaatttttggcaaacaaggaactggaagagacaacgtggatgcggacaaagtcatgataaccaacgaagaagaaattaaaactactaacccggtagcaacggagtcctatggacaagtggccacaaaccaccagagtgcccgggcacaggcgcagaccggctgggttcaaaaccaaggaatacttccgggtatggtttggcaggacagagatgtgtacctgcaaggacccatttgggccaaaattcctcacacggacggcaactttcacccttctccgctgatgggagggtttggaatgaagcacccgcctcctcagatcctcatcaaaaacacacctgtacctgcggatcctccaacggccttcaacaagggcaagctgaactctttcatcacccagtattctactggccaagtcagcgtggagatcgagtgggagctgcagaaggaaaacagcaagcgctggaacccggagatccagtacacttccaactattacaagtctaataatgttgaatttgctgttaatactgaaggtgtatatagtgaaccccgccccattggcaccagatacctgactcgtaatctg

SEQ ID NO: 690 - protein, 736 aa, synthetic construct
  REGION 1..736: note = Adeno Associated Virus Capsid Protein Variant
MAADGYLPDWLEDNLSEGIREWWALKPGAPQPKANQQHQDNARGLVLPGYKYLGPGNGLDKGEPVNAADAAALEHDKAYDQQLKAGDNPYLKYNHADAEFQERLKEDTSFGGNLGRAVFQAKKRLLEPLGLVEEAAKTAPGKKRPVEQSPQEPDSSAGIGKSGAQPAKKRLNFGQTGDTESVPDPQPIGEPPAAPSGVGSLTMASGGGAPVADNNEGADGVGSSSGNWHCDSQWLGDRVITTSTRTWALPTYNNHLYKQISNSTSGGSSNDNAYFGYSTPWGYFDFNRFHCHFSPRDWQRLINNNWGFRPKRLNFKLFNIQVKEVTDNNGVKTIANNLTSTVQVFTDSDYQLPYVLGSAHEGCLPPFPADVFMIPQYGYLTLNDGSQAVGRSSFYCLEYFPSQMLRTGNNFQFSYEFENVPFHSSYAHSQSLDRLMNPLIDQYLYYLSKTINGSGQNQQTLKFSVAGPSNMQVQGRNYIPGPSYRQQRVSTTVTQNNNSEFAWPGASSWALNGRNSLMNPGPAMASHKEGEDRFFPLSGSLIFGKQGTGRDNVDADKVMITNEEEIKTTNPVATESYGQVATNHQSARAQAQTGWVQNQGILPGMVWQDRDVYLQGPIWAKIPHTDGNFHPSPLMGGFGMKHPPPQILIKNTPVPADPPTAFNKGKLNSFITQYSTGQVSVEIEWELQKENSKRWNPEIQYTSNYYKSNNVEFAVNTEGVYSEPRPIGTRYLTRNL

SEQ ID NO: 691 - DNA, 2208 bp, synthetic construct
  misc_feature 1..2208: note = Adeno Associated Virus Capsid Protein Variant
  source 1..2208: mol_type = other DNA
atggctgccgatggttatcttccagattggctcgaggacaaccttagtgaaggaattcgcgagtggtgggctgggaaacctggagcccctcaacccaaggcaaatcaacaacatcaagacaacgctcgaggtcttgtgcttccgggttacaaataccttggacccggcaacggactcgacaagggggagccggtcaacgcagcagacgcggcggccctcgagcacgacaaggcctacgaccagcagctcaaggccggagacaacccgtacctcaagtacaaccacgccgacgccgagttccaggagcggctcaaagaagatacgtcttttgggggcaacctcgggcgagcagtcttccaggccaaaaagaggcttcttgaacctcttggtctggttgaggaagcggctaagacggctcctggaaagaagaggcctgtagagcagtctcctcaggaaccggactcctccgcgggtattggcaaatcgggtgcacagcccgctaaaaagagactcaatttcggtcagactggcgacacagagtcagtcccagaccctcaaccaatcggagaacctcccgcagccccctcaggtgtgggatctcttacaatggcttcaggtggtggcgcaccagtggcagacaataacgaaggtgccgatggagtgggtagttcctcgggaaattggcattgcgattcccaatggctgggggacagagtcatcaccaccagcacccgaacctgggccctgcccacctacaacaatcacctctacaagcaaatctccaacagcacatctggaggatcttcaaatgacaacgcctacttcggctacagcaccccctgggggtattttgacttcaacagattccactgccacttctcaccacgtgactggcagcgactcatcaacaacaactggggattccggcctaagcgactcaacttcaagctcttcaacattcaggtcaaagaggttacggacaacaatggagtcaagaccatcgccaataaccttaccagcacggtccaggtcttcacggactcagactatcagctcccgtacgtgctcgggtcggctcacgagggctgcctcccgccgttcccagcggacgttttcatgattcctcagtacgggtatctgacgcttaatgatggaagccaggccgtgggtcgttcgtccttttactgcctggaatatttcccgtcgcaaatgctaagaacgggtaacaacttccagttcagctacgagtttgagaacgtacctttccatagcagctacgctcacagccaaagcctggaccgactaatgaatccactcatcgaccaatacttgtactatctctcaaagactattaacggttctggacagaatcaacaaacgctaaaattcagtgtggccggacccagcaacatggctgtccagggaagaaactacatacctggacccagctaccgacaacaacgtgtctcaaccactgtgactcaaaacaacaacagcgaatttgcttggcctggagcttcttcttgggctctcaatggacgtaatagcttgatgaatcctggacctgctatggccagccacaaagaaggagaggaccgtttctttcctttgtctggatctttaatttttggcaaacaaggaactggaagagacaacgtggatgcggacaaagtcatgataaccaacgaagaagaaattaaaactactaacccggtagcaacggagtcctatggacaagtggccacaaaccaccagagtgcccgggcacaggcgcagaccggctgggttcaaaaccaaggaatacttccgggtatggtttggcaggacagagatgtgtacctgcaaggacccatttgggccaaaattcctcacacggacggcaactttcacccttctccgctgatgggagggtttggaatgaagcacccgcctcctcagatcctcatcaaaaacacacctgtacctgcggatcctccaacggccttcaacaagggcaagctgaactctttcatcacccagtattctactggccaagtcagcgtggagatcgagtgggagctgcagaaggaaaacagcaagcgctggaacccggagatccagtacacttccaactattacaagtctaataatgttgaatttgctgttaatactgaaggtgtatatagtgaaccccgccccattggcaccagatacctgactcgtaatctg

SEQ ID NO: 692 - protein, 736 aa, synthetic construct
  REGION 1..736: note = Adeno Associated Virus Capsid Protein Variant
MAADGYLPDWLEDNLSEGIREWWAGKPGAPQPKANQQHQDNARGLVLPGYKYLGPGNGLDKGEPVNAADAAALEHDKAYDQQLKAGDNPYLKYNHADAEFQERLKEDTSFGGNLGRAVFQAKKRLLEPLGLVEEAAKTAPGKKRPVEQSPQEPDSSAGIGKSGAQPAKKRLNFGQTGDTESVPDPQPIGEPPAAPSGVGSLTMASGGGAPVADNNEGADGVGSSSGNWHCDSQWLGDRVITTSTRTWALPTYNNHLYKQISNSTSGGSSNDNAYFGYSTPWGYFDFNRFHCHFSPRDWQRLINNNWGFRPKRLNFKLFNIQVKEVTDNNGVKTIANNLTSTVQVFTDSDYQLPYVLGSAHEGCLPPFPADVFMIPQYGYLTLNDGSQAVGRSSFYCLEYFPSQMLRTGNNFQFSYEFENVPFHSSYAHSQSLDRLMNPLIDQYLYYLSKTINGSGQNQQTLKFSVAGPSNMAVQGRNYIPGPSYRQQRVSTTVTQNNNSEFAWPGASSWALNGRNSLMNPGPAMASHKEGEDRFFPLSGSLIFGKQGTGRDNVDADKVMITNEEEIKTTNPVATESYGQVATNHQSARAQAQTGWVQNQGILPGMVWQDRDVYLQGPIWAKIPHTDGNFHPSPLMGGFGMKHPPPQILIKNTPVPADPPTAFNKGKLNSFITQYSTGQVSVEIEWELQKENSKRWNPEIQYTSNYYKSNNVEFAVNTEGVYSEPRPIGTRYLTRNL

SEQ ID NO: 693 - DNA, 2208 bp, synthetic construct
  misc_feature 1..2208: note = Adeno Associated Virus Capsid Protein Variant
  source 1..2208: mol_type = other DNA
atggctgccgatggttatcttccagatattctcgaggacaaccttagtgaaggaattcgcgagtggtgggctttgaaacctggagcccctcaacccaaggcaaatcaacaacatcaagacaacgctcgaggtcttgtgcttccgggttacaaataccttggacccggcaacggactcgacaagggggagccggtcaacgcagcagacgcggcggccctcgagcacgacaaggcctacgaccagcagctcaaggccggagacaacccgtacctcaagtacaaccacgccgacgccgagttccaggagcggctcaaagaagatacgtcttttgggggcaacctcgggcgagcagtcttccaggccaaaaagaggcttcttgaacctcttggtctggttgaggaagcggctaagacggctcctggaaagaagaggcctgtagagcagtctcctcaggaaccggactcctccgcgggtattggcaaatcgggtgcacagcccgctaaaaagagactcaatttcggtcagactggcgacacagagtcagtcccagaccctcaaccaatcggagaacctcccgcagccccctcaggtgtgggatctcttacaatggcttcaggtggtggcgcaccagtggcagacaataacgaaggtgccgatggagtgggtagttcctcgggaaattggcattgcgattcccaatggctgggggacagagtcatcaccaccagcacccgaacctgggccctgcccacctacaacaatcacctctacaagcaaatctccaacagcacatctggaggatcttcaaatgacaacgcctacttcggctacagcaccccctgggggtattttgacttcaacagattccactgccacttctcaccacgtgactggcagcgactcatcaacaacaactggggattccggcctaagcgactcaacttcaagctcttcaacattcaggtcaaagaggttacggacaacaatggagtcaagaccatcgccaataaccttaccagcacggtccaggtcttcacggactcagactatcagctcccgtacgtgctcgggtcggctcacgagggctgcctcccgccgttcccagcggacgttttcatgattcctcagtacgggtatctgacgcttaatgatggaagccaggccgtgggtcgttcgtccttttactgcctggaatatttcccgtcgcaaatgctaagaacgggtaacaacttccagttcagctacgagtttgagaacgtacctttccatagcagctacgctcacagccaaagcctggaccgactaatgaatccactcatcgaccaatacttgtactatctctcaaagactattaacggttctggacagaatcaacaaacgctaaaattcagtgtggccggacccagcaacatggctgtccagggaagaaactacatacctggacccagctaccgacaacaacgtgtctcaaccactgtgactcaaaacaacaacagcgaatttgcttggcctggagcttcttcttgggctctcaatggacgtaatagcttgatgaatcctggacctgctatggccagccacaaagaaggagaggaccgtttctttcctttgtctggatctttaatttttggcaaacaaggaactggaagagacaacgtggatgcggacaaagtcatgataaccaacgaagaagaaattaaaactactaacccggtagcaacggagtcctatggacaagtggccacaaaccaccagagtgcccgggcacaggcgcagaccggctgggttcaaaaccaaggaatacttccgggtatggtttggcaggacagagatgtgtacctgcaaggacccatttgggccaaaattcctcacacggacggcaactttcacccttctccgctgatgggagggtttggaatgaagcacccgcctcctcagatcctcatcaaaaacacacctgtacctgcggatcctccaacggccttcaacaagggcaagctgaactctttcatcacccagtattctactggccaagtcagcgtggagatcgagtgggagctgcagaaggaaaacagcaagcgctggaacccggagatccagtacacttccaactattacaagtctaataatgttgaatttgctgttaatactgaaggtgtatatagtgaaccccgccccattggcaccagatacctgactcgtaatctg

SEQ ID NO: 694 - protein, 736 aa, synthetic construct
  REGION 1..736: note = Adeno Associated Virus Capsid Protein Variant
MAADGYLPDILEDNLSEGIREWWALKPGAPQPKANQQHQDNARGLVLPGYKYLGPGNGLDKGEPVNAADAAALEHDKAYDQQLKAGDNPYLKYNHADAEFQERLKEDTSFGGNLGRAVFQAKKRLLEPLGLVEEAAKTAPGKKRPVEQSPQEPDSSAGIGKSGAQPAKKRLNFGQTGDTESVPDPQPIGEPPAAPSGVGSLTMASGGGAPVADNNEGADGVGSSSGNWHCDSQWLGDRVITTSTRTWALPTYNNHLYKQISNSTSGGSSNDNAYFGYSTPWGYFDFNRFHCHFSPRDWQRLINNNWGFRPKRLNFKLFNIQVKEVTDNNGVKTIANNLTSTVQVFTDSDYQLPYVLGSAHEGCLPPFPADVFMIPQYGYLTLNDGSQAVGRSSFYCLEYFPSQMLRTGNNFQFSYEFENVPFHSSYAHSQSLDRLMNPLIDQYLYYLSKTINGSGQNQQTLKFSVAGPSNMAVQGRNYIPGPSYRQQRVSTTVTQNNNSEFAWPGASSWALNGRNSLMNPGPAMASHKEGEDRFFPLSGSLIFGKQGTGRDNVDADKVMITNEEEIKTTNPVATESYGQVATNHQSARAQAQTGWVQNQGILPGMVWQDRDVYLQGPIWAKIPHTDGNFHPSPLMGGFGMKHPPPQILIKNTPVPADPPTAFNKGKLNSFITQYSTGQVSVEIEWELQKENSKRWNPEIQYTSNYYKSNNVEFAVNTEGVYSEPRPIGTRYLTRNL

SEQ ID NO: 695 - DNA, 2208 bp, synthetic construct
  misc_feature 1..2208: note = Adeno Associated Virus Capsid Protein Variant
  source 1..2208: mol_type = other DNA
atggctgccgatggttatcttccagattggctcgaggacaaccttagtgaaggaattcgcgagtggtgggctttgaaacctggagcccctcaacccaaggcaaatcaacaacatcaagacaacgctcgaggtcttgtgcttccgggttacaaataccttggacccggcaacggactcgacaagggggagccggtcaacgcagcagacgcggcggccctcgagcacgacaaggcctacgaccagcagctcaaggccggagacaacccgtacctcaagtacaaccacgccgacgccgagttccaggagcggctcaaagaagatacgtcttttgggggcaacctcgggcgagcagtcttccaggccaaaaagaggcttcttgaacctcttggtctggttgaggaagcggctaagacggctcctggaaagaagaggcctgtagagcagtctcctcaggaaccggactcctccgcgggtattggcaaagggggtgcacagcccgctaaaaagagactcaatttcggtcagactggcgacacagagtcagtcccagaccctcaaccaatcggagaacctcccgcagccccctcaggtgtgggatctcttacaatggcttcaggtggtggcgcaccagtggcagacaataacgaaggtgccgatggagtgggtagttcctcgggaaattggcattgcgattcccaatggctgggggacagagtcatcaccaccagcacccgaacctgggccctgcccacctacaacaatcacctctacaagcaaatctccaacagcacatctggaggatcttcaaatgacaacgcctacttcggctacagcaccccctgggggtattttgacttcaacagattccactgccacttctcaccacgtgactggcagcgactcatcaacaacaactggggattccggcctaagcgactcaacttcaagctcttcaacattcaggtcaaagaggttacggacaacaatggagtcaagaccatcgccaataaccttaccagcacggtccaggtcttcacggactcagactatcagctcccgtacgtgctcgggtcggctcacgagggctgcctcccgccgttcccagcggacgttttcatgattcctcagtacgggtatctgacgcttaatgatggaagccaggccgtgggtcgttcgtccttttactgcctggaatatttcccgtcgcaaatgctaagaacgggtaacaacttccagttcagctacgagtttgagaacgtacctttccatagcagctacgctcacagccaaagcctggaccgactaatgaatccactcatcgaccaatacttgtactatctctcaaagactattaacggttctggacagaatcaacaaacgctaaaattcagtgtggccggacccagcaacatggctgtccagggaagaaactacatacctggacccagctaccgacaacaacgtgtctcaaccactgtgactcaaaacaacaacagcgaatttgcttggcctggagcttcttcttgggctctcaatggacgtaatagcttgatgaatcctggacctgctatggccagccacaaagaaggagaggaccgtttctttcctttgtctggatctttaatttttggcaaacaaggaactggaagagacaacgtggatgcggacaaagtcatgataaccaacgaagaagaaattaaaactactaacccggtagcaacggagtcctatggacaagtggccacaaaccaccagagtgcccgggcacaggcgcagaccggctgggttcaaaaccaaggaatacttccgggtatggtttggcaggacagagatgtgtacctgcaaggacccatttgggccaaaattcctcacacggacggcaactttcacccttctccgctgatgggagggtttggaatgaagcacccgcctcctcagatcctcatcaaaaacacacctgtacctgcggatcctccaacggccttcaacaagggcaagctgaactctttcatcacccagtattctactggccaagtcagcgtggagatcgagtgggagctgcagaaggaaaacagcaagcgctggaacccggagatccagtacacttccaactattacaagtctaataatgttgaatttgctgttaatactgaaggtgtatatagtgaaccccgccccattggcaccagatacctgactcgtaatctg

SEQ ID NO: 696 - protein, 736 aa, synthetic construct
  REGION 1..736: note = Adeno Associated Virus Capsid Protein Variant
MAADGYLPDWLEDNLSEGIREWWALKPGAPQPKANQQHQDNARGLVLPGYKYLGPGNGLDKGEPVNAADAAALEHDKAYDQQLKAGDNPYLKYNHADAEFQERLKEDTSFGGNLGRAVFQAKKRLLEPLGLVEEAAKTAPGKKRPVEQSPQEPDSSAGIGKGGAQPAKKRLNFGQTGDTESVPDPQPIGEPPAAPSGVGSLTMASGGGAPVADNNEGADGVGSSSGNWHCDSQWLGDRVITTSTRTWALPTYNNHLYKQISNSTSGGSSNDNAYFGYSTPWGYFDFNRFHCHFSPRDWQRLINNNWGFRPKRLNFKLFNIQVKEVTDNNGVKTIANNLTSTVQVFTDSDYQLPYVLGSAHEGCLPPFPADVFMIPQYGYLTLNDGSQAVGRSSFYCLEYFPSQMLRTGNNFQFSYEFENVPFHSSYAHSQSLDRLMNPLIDQYLYYLSKTINGSGQNQQTLKFSVAGPSNMAVQGRNYIPGPSYRQQRVSTTVTQNNNSEFAWPGASSWALNGRNSLMNPGPAMASHKEGEDRFFPLSGSLIFGKQGTGRDNVDADKVMITNEEEIKTTNPVATESYGQVATNHQSARAQAQTGWVQNQGILPGMVWQDRDVYLQGPIWAKIPHTDGNFHPSPLMGGFGMKHPPPQILIKNTPVPADPPTAFNKGKLNSFITQYSTGQVSVEIEWELQKENSKRWNPEIQYTSNYYKSNNVEFAVNTEGVYSEPRPIGTRYLTRNL

SEQ ID NO: 697 - DNA, 2208 bp, synthetic construct
  misc_feature 1..2208: note = Adeno Associated Virus Capsid Protein Variant
  source 1..2208: mol_type = other DNA
atggctgccgatggttatcttccagattggctcgaggacaaccttagtgaaggaattcgcgagtggtgggctttgaaacctggagcccctcaacccaaggcaaatcaacaacatcaagacaacgctcgaggtcttgtgcttccgggttacaaataccttggacccggcaacggactcgacaagggggagccggtcaacgcagcagacgcggcggccctcgagcacgacaaggcctacgaccagcagctcaaggccggagacaacccgtacctcaagtacaaccacgccgacgccgagttccaggagcggctcaaagaagatacgtcttttgggggcaacctcgggcgagcagtcttccaggccaaaaagaggcttcttgaacctcttggtctggttgaggaagcggctaagacggctcctggaaagaagaggcctgtagagcagtctcctcaggaaccggactcctccgcgggtattggcaaatcgggtgcacagcccgctaaaaagagactcaatttcggtcagactggcgacacagagtcagtcccagaccctcaaccaatcggagaacctcccgcagccccctcaggtgtgggatctcttacaatggcttcaggtggtggcgcaccagtggcagacaataacgaaggtgccgatggagtgggtagttcctcgggaaattggcattgcgattcccaatggctgggggacagagtcatcaccaccagcacccgaacctgggccctgcccacctacaacaatcacctctacaagcaaatctccaacagcacatctggaggatcttcaaatgacaacgcctacttcggctacagcaccccctgggggtattttgacttcaacagattccactgccacttctcaccacgtgactggcagcgactcatcaacaacaactggggattccggcctaagcgactcaacttcaagctcttcaacattcaggtcaaagaggttacggacaacaatggagtcaagaccatcgccaataaccttaccagcacggtccaggtcttcacggactcagactatcagctcccgtacgtgctcgggtcggctcacgagggctgcctcccgccgttcccagcggacgttttcatgattcctcagtacgggtatctgacgcttaatgatggaagccaggccgtgggtcgttcgtccttttactgcctggaatatttcccgtcgcaaatgctaagaacgggtaacaacttccagttcagctacgagtttgagaacgtacctttccatagcagctacgctcacagccaaagcctggaccgactaatgaatccactcatcgaccaatacttgtactatctctcaaagactattaacggttctggacagaatcaacaaacgctaaaattcagtgtggccggacccagcaacatggctgtccagggaagaaactacatacctggacccagctaccgacaacaacgtgtctcaaccactgtgactcaaaacaacaacagcgaatttgcttggcctggagcttcttcttgggctctcaatggacgtaatagcttgatgaatcctggacctgctatggccagccacaaagaaggagaggaccgtttctttcctttgtctggatctttaatttttggcaaacaaggaactggaagagacaacgtggatgcggacaaagtcatgataaccctggaagaagaaattaaaactactaacccggtagcaacggagtcctatggacaagtggccacaaaccaccagagtgcccgggcacaggcgcagaccggctgggttcaaaaccaaggaatacttccgggtatggtttggcaggacagagatgtgtacctgcaaggacccatttgggccaaaattcctcacacggacggcaactttcacccttctccgctgatgggagggtttggaatgaagcacccgcctcctcagatcctcatcaaaaacacacctgtacctgcggatcctccaacggccttcaacaagggcaagctgaactctttcatcacccagtattctactggccaagtcagcgtggagatcgagtgggagctgcagaaggaaaacagcaagcgctggaacccggagatccagtacacttccaactattacaagtctaataatgttgaatttgctgttaatactgaaggtgtatatagtgaaccccgccccattggcaccagatacctgactcgtaatctg

SEQ ID NO: 698 - protein, 736 aa, synthetic construct
  REGION 1..736: note = Adeno Associated Virus Capsid Protein Variant
MAADGYLPDWLEDNLSEGIREWWALKPGAPQPKANQQHQDNARGLVLPGYKYLGPGNGLDKGEPVNAADAAALEHDKAYDQQLKAGDNPYLKYNHADAEFQERLKEDTSFGGNLGRAVFQAKKRLLEPLGLVEEAAKTAPGKKRPVEQSPQEPDSSAGIGKSGAQPAKKRLNFGQTGDTESVPDPQPIGEPPAAPSGVGSLTMASGGGAPVADNNEGADGVGSSSGNWHCDSQWLGDRVITTSTRTWALPTYNNHLYKQISNSTSGGSSNDNAYFGYSTPWGYFDFNRFHCHFSPRDWQRLINNNWGFRPKRLNFKLFNIQVKEVTDNNGVKTIANNLTSTVQVFTDSDYQLPYVLGSAHEGCLPPFPADVFMIPQYGYLTLNDGSQAVGRSSFYCLEYFPSQMLRTGNNFQFSYEFENVPFHSSYAHSQSLDRLMNPLIDQYLYYLSKTINGSGQNQQTLKFSVAGPSNMAVQGRNYIPGPSYRQQRVSTTVTQNNNSEFAWPGASSWALNGRNSLMNPGPAMASHKEGEDRFFPLSGSLIFGKQGTGRDNVDADKVMITLEEEIKTTNPVATESYGQVATNHQSARAQAQTGWVQNQGILPGMVWQDRDVYLQGPIWAKIPHTDGNFHPSPLMGGFGMKHPPPQILIKNTPVPADPPTAFNKGKLNSFITQYSTGQVSVEIEWELQKENSKRWNPEIQYTSNYYKSNNVEFAVNTEGVYSEPRPIGTRYLTRNL

SEQ ID NO: 699 - DNA, 2208 bp, synthetic construct
  misc_feature 1..2208: note = Adeno Associated Virus Capsid Protein Variant
  source 1..2208: mol_type = other DNA
atggctgccgatggttatcttccagattggctcgaggacaaccttagtgaaggaattcgcgagtggtgggctttgaaacctggagcccctcaacccaaggcaaatcaacaacatcaagacaacgctcgaggtcttgtgcttccgggttacaaataccttggacccggcaacggactcgacaagggggagccggtcaacgcagcagacgcggcggccctcgagcacgacaaggcctacgaccagcagctcaaggccggagacaacccgtacctcaagtacaaccacgccgacgccgagttccaggagcggctcaaagaagatacgtcttttgggggcaacctcgggcgagcagtcttccaggccaaaaagaggcttcttgaacctcttggtctggttgaggaagcggctaagacggctcctggaaagaagaggcctgtagagcagtctcctcaggaaccggactcctccgcgggtattggcaaatcgggtgcacagcccgctaaagtgagactcaatttcggtcagactggcgacacagagtcagtcccagaccctcaaccaatcggagaacctcccgcagccccctcaggtgtgggatctcttacaatggcttcaggtggtggcgcaccagtggcagacaataacgaaggtgccgatggagtgggtagttcctcgggaaattggcattgcgattcccaatggctgggggacagagtcatcaccaccagcacccgaacctgggccctgcccacctacaacaatcacctctacaagcaaatctccaacagcacatctggaggatcttcaaatgacaacgcctacttcggctacagcaccccctgggggtattttgacttcaacagattccactgccacttctcaccacgtgactggcagcgactcatcaacaacaactggggattccggcctaagcgactcaacttcaagctcttcaacattcaggtcaaagaggttacggacaacaatggagtcaagaccatcgccaataaccttaccagcacggtccaggtcttcacggactcagactatcagctcccgtacgtgctcgggtcggctcacgagggctgcctcccgccgttcccagcggacgttttcatgattcctcagtacgggtatctgacgcttaatgatggaagccaggccgtgggtcgttcgtccttttactgcctggaatatttcccgtcgcaaatgctaagaacgggtaacaacttccagttcagctacgagtttgagaacgtacctttccatagcagctacgctcacagccaaagcctggaccgactaatgaatccactcatcgaccaatacttgtactatctctcaaagactattaacggttctggacagaatcaacaaacgctaaaattcagtgtggccggacccagcaacatggctgtccagggaagaaactacatacctggacccagctaccgacaacaacgtgtctcaaccactgtgactcaaaacaacaacagcgaatttgcttggcctggagcttcttcttgggctctcaatggacgtaatagcttgatgaatcctggacctgctatggccagccacaaagaaggagaggaccgtttctttcctttgtctggatctttaatttttggcaaacaaggaactggaagagacaacgtggatgcggacaaagtcatgataaccaacgaagaagaaattaaaactactaacccggtagcaacggagtcctatggacaagtggccacaaaccaccagagtgcccgggcacaggcgcagaccggctgggttcaaaaccaaggaatacttccgggtatggtttggcaggacagagatgtgtacctgcaaggacccatttgggccaaaattcctcacacggacggcaactttcacccttctccgctgatgggagggtttggaatgaagcacccgcctcctcagatcctcatcaaaaacacacctgtacctgcggatcctccaacggccttcaacaagggcaagctgaactctttcatcacccagtattctactggccaagtcagcgtggagatcgagtgggagctgcagaaggaaaacagcaagcgctggaacccggagatccagtacacttccaactattacaagtctaataatgttgaatttgctgttaatactgaaggtgtatatagtgaaccccgccccattggcaccagatacctgactcgtaatctg

SEQ ID NO: 700 - protein, 736 aa, synthetic construct
  REGION 1..736: note = Adeno Associated Virus Capsid Protein Variant
MAADGYLPDWLEDNLSEGIREWWALKPGAPQPKANQQHQDNARGLVLPGYKYLGPGNGLDKGEPVNAADAAALEHDKAYDQQLKAGDNPYLKYNHADAEFQERLKEDTSFGGNLGRAVFQAKKRLLEPLGLVEEAAKTAPGKKRPVEQSPQEPDSSAGIGKSGAQPAKVRLNFGQTGDTESVPDPQPIGEPPAAPSGVGSLTMASGGGAPVADNNEGADGVGSSSGNWHCDSQWLGDRVITTSTRTWALPTYNNHLYKQISNSTSGGSSNDNAYFGYSTPWGYFDFNRFHCHFSPRDWQRLINNNWGFRPKRLNFKLFNIQVKEVTDNNGVKTIANNLTSTVQVFTDSDYQLPYVLGSAHEGCLPPFPADVFMIPQYGYLTLNDGSQAVGRSSFYCLEYFPSQMLRTGNNFQFSYEFENVPFHSSYAHSQSLDRLMNPLIDQYLYYLSKTINGSGQNQQTLKFSVAGPSNMAVQGRNYIPGPSYRQQRVSTTVTQNNNSEFAWPGASSWALNGRNSLMNPGPAMASHKEGEDRFFPLSGSLIFGKQGTGRDNVDADKVMITNEEEIKTTNPVATESYGQVATNHQSARAQAQTGWVQNQGILPGMVWQDRDVYLQGPIWAKIPHTDGNFHPSPLMGGFGMKHPPPQILIKNTPVPADPPTAFNKGKLNSFITQYSTGQVSVEIEWELQKENSKRWNPEIQYTSNYYKSNNVEFAVNTEGVYSEPRPIGTRYLTRNL

SEQ ID NO: 701 - DNA, 2208 bp, synthetic construct
  misc_feature 1..2208: note = Adeno Associated Virus Capsid Protein Variant
  source 1..2208: mol_type = other DNA
atggctgccgatggttatcttccagattggctcgaggacaaccttagtgaaggaattcgcgagtggtgggctttgaaacctggagcccctcaacccaaggcaaatcaacaacatcaagacaacgctcgaggtcttgtgcttccgggttacaaataccttggacccggcaacggactcgacaagggggagccggtcaacgcagcagacgcggcggccctcgagcacgacaaggcctacgaccagcagctcaaggccggagacaacccgtacctcaagtacaaccacgccgacgccgagttccaggagcggctcaaagaagatacgtcttttgggggcaacctcgggcgagcagtcttccaggccaaaaagaggcttcttgaacctcttggtctggttgaggaagcggctaagacggctcctggaaagaagaggcctgtagagcagtctcctcaggaaccggacaggtccgcgggtattggcaaatcgggtgcacagcccgctaaaaagagactcaatttcggtcagactggcgacacagagtcagtcccagaccctcaaccaatcggagaacctcccgcagccccctcaggtgtgggatctcttacaatggcttcaggtggtggcgcaccagtggcagacaataacgaaggtgccgatggagtgggtagttcctcgggaaattggcattgcgattcccaatggctgggggacagagtcatcaccaccagcacccgaacctgggccctgcccacctacaacaatcacctctacaagcaaatctccaacagcacatctggaggatcttcaaatgacaacgcctacttcggctacagcaccccctgggggtattttgacttcaacagattccactgccacttctcaccacgtgactggcagcgactcatcaacaacaactggggattccggcctaagcgactcaacttcaagctcttcaacattcaggtcaaagaggttacggacaacaatggagtcaagaccatcgccaataaccttaccagcacggtccaggtcttcacggactcagactatcagctcccgtacgtgctcgggtcggctcacgagggctgcctcccgccgttcccagcggacgttttcatgattcctcagtacgggtatctgacgcttaatgatggaagccaggccgtgggtcgttcgtccttttactgcctggaatatttcccgtcgcaaatgctaagaacgggtaacaacttccagttcagctacgagtttgagaacgtacctttccatagcagctacgctcacagccaaagcctggaccgactaatgaatccactcatcgaccaatacttgtactatctctcaaagactattaacggttctggacagaatcaacaaacgctaaaattcagtgtggccggacccagcaacatggctgtccagggaagaaactacatacctggacccagctaccgacaacaacgtgtctcaaccactgtgactcaaaacaacaacagcgaatttgcttggcctggagcttcttcttgggctctcaatggacgtaatagcttgatgaatcctggacctgctatggccagccacaaagaaggagaggaccgtttctttcctttgtctggatctttaatttttggcaaacaaggaactggaagagacaacgtggatgcggacaaagtcatgataaccaacgaagaagaaattaaaactactaacccggtagcaacggagtcctatggacaagtggccacaaaccaccagagtgcccgggcacaggcgcagaccggctgggttcaaaaccaaggaatacttccgggtatggtttggcaggacagagatgtgtacctgcaaggacccatttgggccaaaattcctcacacggacggcaactttcacccttctccgctgatgggagggtttggaatgaagcacccgcctcctcagatcctcatcaaaaacacacctgtacctgcggatcctccaacggccttcaacaagggcaagctgaactctttcatcacccagtattctactggccaagtcagcgtggagatcgagtgggagctgcagaaggaaaacagcaagcgctggaacccggagatccagtacacttccaactattacaagtctaataatgttgaatttgctgttaatactgaaggtgtatatagtgaaccccgccccattggcaccagatacctgactcgtaatctg

SEQ ID NO: 702 - protein, 736 aa, synthetic construct
  REGION 1..736: note = Adeno Associated Virus Capsid Protein Variant
MAADGYLPDWLEDNLSEGIREWWALKPGAPQPKANQQHQDNARGLVLPGYKYLGPGNGLDKGEPVNAADAAALEHDKAYDQQLKAGDNPYLKYNHADAEFQERLKEDTSFGGNLGRAVFQAKKRLLEPLGLVEEAAKTAPGKKRPVEQSPQEPDRSAGIGKSGAQPAKKRLNFGQTGDTESVPDPQPIGEPPAAPSGVGSLTMASGGGAPVADNNEGADGVGSSSGNWHCDSQWLGDRVITTSTRTWALPTYNNHLYKQISNSTSGGSSNDNAYFGYSTPWGYFDFNRFHCHFSPRDWQRLINNNWGFRPKRLNFKLFNIQVKEVTDNNGVKTIANNLTSTVQVFTDSDYQLPYVLGSAHEGCLPPFPADVFMIPQYGYLTLNDGSQAVGRSSFYCLEYFPSQMLRTGNNFQFSYEFENVPFHSSYAHSQSLDRLMNPLIDQYLYYLSKTINGSGQNQQTLKFSVAGPSNMAVQGRNYIPGPSYRQQRVSTTVTQNNNSEFAWPGASSWALNGRNSLMNPGPAMASHKEGEDRFFPLSGSLIFGKQGTGRDNVDADKVMITNEEEIKTTNPVATESYGQVATNHQSARAQAQTGWVQNQGILPGMVWQDRDVYLQGPIWAKIPHTDGNFHPSPLMGGFGMKHPPPQILIKNTPVPADPPTAFNKGKLNSFITQYSTGQVSVEIEWELQKENSKRWNPEIQYTSNYYKSNNVEFAVNTEGVYSEPRPIGTRYLTRNL

SEQ ID NO: 703 - DNA, 2208 bp, synthetic construct
  misc_feature 1..2208: note = Adeno Associated Virus Capsid Protein Variant
  source 1..2208: mol_type = other DNA
atggctgccgatggttatcttccagattggctcgaggacaaccttagtgaaggaattcgcgagtggtgggctttgaaacctggagcccctcaacccaaggcaaatcaacaacatcaagacaacgctcgaggtcttgtgcttccgggttacaaataccttggacccggcaacggactcgacaagggggagccggtcaacgcagcagacgcggcggccctcgagcacgacaaggcctacgaccagcagctcaaggccggagacaacccgtacctcaagtacaaccacgccgacgccgagttccaggagcggctcaaagaagatacgtcttttgggggcaacctcgggcgagcagtcttccaggccaaaaagaggcttcttgaacctcttggtctggttgaggaagcggctaagacggctcctggaaagaagaggcctgtagagcagtctcctcaggaaccggactcctccgcgggtattggcaaatcgggtgcacagcccgctaaaaagagactcaatttcggtcagactggcgacacagagtcagtcccagaccctcaaccaatcggagaacctcccgcagccccctcaggtgtgggatctcttacaatggcttcaggtggtggcgcaccagtggcagacaataacgaaggtgccgatggagtgggtagttcctcgggaaattggcattgcgattcccaatggctgggggacagagtcatcaccaccagcacccgaacctgggccctgcccacctacaacaatcacctctacaagcaaatctccaacagcacatctggaggatcttcaaatgacaacgcctacttcggctacagcaccccctgggggtattttgacttcaacagattccactgccacttctcaccacgtgactggcagcgactcatcaacaacaactggggattccggcctaagcgactcaacttcaagctcttcaacattcaggtcaaagaggttacggacaacaatggagtcaagaccatcgccaataaccttaccagcacggtccaggtcttcacggactcagactatcagctcccgtacgtgctcgggtcggctcacgagggctgcctcccgccgttcccagcggacgttttcatgattcctcagtacgggtatctgacgcttaatgatggaagccaggccgtgggtcgttcgtccttttactgcctggaatatttcccgtcgcaaatgctaagaacgggtaacaacttccagttcagctacgagtttgagaacgtacctttccatagcagctacgctcacagccaaagcctggaccgactaatgaatccactcatcgaccaatacttgtactatctctcaaagactattaacggttctggacagaatcaacaaacgctaaaattcagtgtggccggacccagcaacatggctgtccagggaagaaactacatacctggacccagctaccgacaacaacgtgtctcaaccactgtgactcaaaacaacaacagcgaatttgcttggcctggagcttcttcttgggctctcaatggacgtaatagcttgatgaatcctggacctgctatggccagccacaaagaaggagaggaccgtttctttcctttgtctggatctttaatttttggcaaacaaggaactggaagagacaacgtggatgcggacaaagtcatgataaccaacgaagaagaaattaaaactactaacccggtagcaacggagtcctatggacaagtggccacaaaccaccagagtgcccgggcacaggcgcagaccggctgggttcaaaaccaaggaatacttccgggtatggtttggcaggacagagatgtgtacctgcaaggacccatttgggccaaaattcctcacacggacggcaactttcacccttctccgctgatgggagggtttggaatgaagacgccgcctcctcagatcctcatcaaaaacacacctgtacctgcggatcctccaacggccttcaacaagggcaagctgaactctttcatcacccagtattctactggccaagtcagcgtggagatcgagtgggagctgcagaaggaaaacagcaagcgctggaacccggagatccagtacacttccaactattacaagtctaataatgttgaatttgctgttaatactgaaggtgtatatagtgaaccccgccccattggcaccagatacctgactcgtaatctg

SEQ ID NO: 704 - protein, 736 aa, synthetic construct
  REGION 1..736: note = Adeno Associated Virus Capsid Protein Variant
MAADGYLPDWLEDNLSEGIREWWALKPGAPQPKANQQHQDNARGLVLPGYKYLGPGNGLDKGEPVNAADAAALEHDKAYDQQLKAGDNPYLKYNHADAEFQERLKEDTSFGGNLGRAVFQAKKRLLEPLGLVEEAAKTAPGKKRPVEQSPQEPDSSAGIGKSGAQPAKKRLNFGQTGDTESVPDPQPIGEPPAAPSGVGSLTMASGGGAPVADNNEGADGVGSSSGNWHCDSQWLGDRVITTSTRTWALPTYNNHLYKQISNSTSGGSSNDNAYFGYSTPWGYFDFNRFHCHFSPRDWQRLINNNWGFRPKRLNFKLFNIQVKEVTDNNGVKTIANNLTSTVQVFTDSDYQLPYVLGSAHEGCLPPFPADVFMIPQYGYLTLNDGSQAVGRSSFYCLEYFPSQMLRTGNNFQFSYEFENVPFHSSYAHSQSLDRLMNPLIDQYLYYLSKTINGSGQNQQTLKFSVAGPSNMAVQGRNYIPGPSYRQQRVSTTVTQNNNSEFAWPGASSWALNGRNSLMNPGPAMASHKEGEDRFFPLSGSLIFGKQGTGRDNVDADKVMITNEEEIKTTNPVATESYGQVATNHQSARAQAQTGWVQNQGILPGMVWQDRDVYLQGPIWAKIPHTDGNFHPSPLMGGFGMKTPPPQILIKNTPVPADPPTAFNKGKLNSFITQYSTGQVSVEIEWELQKENSKRWNPEIQYTSNYYKSNNVEFAVNTEGVYSEPRPIGTRYLTRNL

SEQ ID NO: 705 - DNA, 2208 bp, synthetic construct
  misc_feature 1..2208: note = Adeno Associated Virus Capsid Protein Variant
  source 1..2208: mol_type = other DNA
atggctgccgatggttatcttccagattggctcgaggacaaccttagtgaaggaattcgcgagtggtgggtgttgaaacctggagcccctcaacccaaggcaaatcaacaacatcaagacaacgctcgaggtcttgtgcttccgggttacaaataccttggacccggcaacggactcgacaagggggagccggtcaacgcagcagacgcggcggccctcgagcacgacaaggcctacgaccagcagctcaaggccggagacaacccgtacctcaagtacaaccacgccgacgccgagttccaggagcggctcaaagaagatacgtcttttgggggcaacctcgggcgagcagtcttccaggccaaaaagaggcttcttgaacctcttggtctggttgaggaagcggctaagacggctcctggaaagaagaggcctgtagagcagtctcctcaggaaccggactcctccgcgggtattggcaaatcgggtgcacagcccgctaaaaagagactcaatttcggtcagactggcgacacagagtcagtcccagaccctcaaccaatcggagaacctcccgcagccccctcaggtgtgggatctcttacaatggcttcaggtggtggcgcaccagtggcagacaataacgaaggtgccgatggagtgggtagttcctcgggaaattggcattgcgattcccaatggctgggggacagagtcatcaccaccagcacccgaacctgggccctgcccacctacaacaatcacctctacaagcaaatctccaacagcacatctggaggatcttcaaatgacaacgcctacttcggctacagcaccccctgggggtattttgacttcaacagattccactgccacttctcaccacgtgactggcagcgactcatcaacaacaactggggattccggcctaagcgactcaacttcaagctcttcaacattcaggtcaaagaggttacggacaacaatggagtcaagaccatcgccaataaccttaccagcacggtccaggtcttcacggactcagactatcagctcccgtacgtgctcgggtcggctcacgagggctgcctcccgccgttcccagcggacgttttcatgattcctcagtacgggtatctgacgcttaatgatggaagccaggccgtgggtcgttcgtccttttactgcctggaatatttcccgtcgcaaatgctaagaacgggtaacaacttccagttcagctacgagtttgagaacgtacctttccatagcagctacgctcacagccaaagcctggaccgactaatgaatccactcatcgaccaatacttgtactatctctcaaagactattaacggttctggacagaatcaacaaacgctaaaattcagtgtggccggacccagcaacatggctgtccagggaagaaactacatacctggacccagctaccgacaacaacgtgtctcaaccactgtgactcaaaacaacaacagcgaatttgcttggcctggagcttcttcttgggctctcaatggacgtaatagcttgatgaatcctggacctgctatggccagccacaaagaaggagaggaccgtttctttcctttgtctggatctttaatttttggcaaacaaggaactggaagagacaacgtggatgcggacaaagtcatgataaccaacgaagaagaaattaaaactactaacccggtagcaacggagtcctatggacaagtggccacaaaccaccagagtgcccgggcacaggcgcagaccggctgggttcaaaaccaaggaatacttccgggtatggtttggcaggacagagatgtgtacctgcaaggacccatttgggccaaaattcctcacacggacggcaactttcacccttctccgctgatgggagggtttggaatgaagcacccgcctcctcagatcctcatcaaaaacacacctgtacctgcggatcctccaacggccttcaacaagggcaagctgaactctttcatcacccagtattctactggccaagtcagcgtggagatcgagtgggagctgcagaaggaaaacagcaagcgctggaacccggagatccagtacacttccaactattacaagtctaataatgttgaatttgctgttaatactgaaggtgtatatagtgaaccccgccccattggcaccagatacctgactcgtaatctg

SEQ ID NO: 706 - protein, 736 aa, synthetic construct
  REGION 1..736: note = Adeno Associated Virus Capsid Protein Variant
MAADGYLPDWLEDNLSEGIREWWVLKPGAPQPKANQQHQDNARGLVLPGYKYLGPGNGLDKGEPVNAADAAALEHDKAYDQQLKAGDNPYLKYNHADAEFQERLKEDTSFGGNLGRAVFQAKKRLLEPLGLVEEAAKTAPGKKRPVEQSPQEPDSSAGIGKSGAQPAKKRLNFGQTGDTESVPDPQPIGEPPAAPSGVGSLTMASGGGAPVADNNEGADGVGSSSGNWHCDSQWLGDRVITTSTRTWALPTYNNHLYKQISNSTSGGSSNDNAYFGYSTPWGYFDFNRFHCHFSPRDWQRLINNNWGFRPKRLNFKLFNIQVKEVTDNNGVKTIANNLTSTVQVFTDSDYQLPYVLGSAHEGCLPPFPADVFMIPQYGYLTLNDGSQAVGRSSFYCLEYFPSQMLRTGNNFQFSYEFENVPFHSSYAHSQSLDRLMNPLIDQYLYYLSKTINGSGQNQQTLKFSVAGPSNMAVQGRNYIPGPSYRQQRVSTTVTQNNNSEFAWPGASSWALNGRNSLMNPGPAMASHKEGEDRFFPLSGSLIFGKQGTGRDNVDADKVMITNEEEIKTTNPVATESYGQVATNHQSARAQAQTGWVQNQGILPGMVWQDRDVYLQGPIWAKIPHTDGNFHPSPLMGGFGMKHPPPQILIKNTPVPADPPTAFNKGKLNSFITQYSTGQVSVEIEWELQKENSKRWNPEIQYTSNYYKSNNVEFAVNTEGVYSEPRPIGTRYLTRNL

SEQ ID NO: 707 - DNA, 2208 bp, synthetic construct
  misc_feature 1..2208: note = Adeno Associated Virus Capsid Protein Variant
  source 1..2208: mol_type = other DNA
atggctgccgatggttatcttccagattggctcgaggacaaccttagtgaaggaattcgcgagtggtgggctttgaaacctggagcccctcaacccaaggcaaatcaacaacatcaagacaacgctcgaggtcttgtgcttccgggttacaaataccttggacccggcaacggactcgacaagggggagccggtcaacgcagcagacgcggcggccctcgagcacgacaaggcctacgaccagcagctcaaggccggagacaacccgtacctcaagtacaaccacgccgacgccgagttccaggagcggctcaaagaagatacgtcttttgggggcaacctcgggcgagcagtcttccaggccaaaaagaggcttcttgaacctcttggtctggttgaggaagcggctaagacggctcctggaaagaagaggcctgtagagcagtctcctcaggaaccggactcctccgcgggtattggcaaatcgggtgcacagcccgctaaaaagagactcaatttcggtcagactggcgacacagagtcagtcccagaccctcaaccaatcggagaacctcccgcagccccctcaggtgtgggatctcttacaatggcttcaggtggtggcgcaccagtggcagacaataacgaaggtgccgatggagtgggtagttcctcgggaaattggcattgcgattcccaatggctgggggacagagtcatcaccaccagcacccgaacctgggccctgcccacctacaacaatcacctctacaagcaaatctccaacagcacatctggaggatcttcaaatgacaacgcctacttcggctacagcaccccctgggggtattttgacttcaacagattccactgccacttctcaccacgtgactggcagcgactcatcaacaacaactggggattccggcctaagcgactcaacttcaagctcttcaacattcaggtcaaagaggttacggacaacaatggagtcaagaccatcgccaataaccttaccagcacggtccaggtcttcacggactcagactatcagctcccgtacgtgctcgggtcggctcacgagggctgcctcccgccgttcccagcggacgttttcatgattcctcagtacgggtatctgacgcttaatgatggaagccaggccgtgggtcgttcgtccttttactgcctggaatatttcccgtcgcaaatgctaagaacgggtaacaacttccagttcagctacgagtttgagaacgtacctttccatagcagctacgctcacagccaaagcctggaccgactaatgaatccactcatcgaccaatacttgtactatctctcaaagactattaacggttctggacagaatcaacaaacgctaaaattcagtgtggccggacccagcaacatggctgtccagggaagaaactacatacctggacccagctaccgacaacaacgtgtctcaaccactgtgactcaaaacaacaacagcgaatttgcttggcctggagcttcttcttgggctctcaatggacgtaatagcttgatgaatcctggacctgctatggccagccacaaagaaggagaggaccgtttctttcctttgtctggatctttaatttttggcaaacaaggaactggaagagacaacgtggatgcggacaaagtcatgataaccaacgaagaagaaattaaaactactaacccggtagcaacggagtcctatggacaagtggccacaaaccaccagagtgccgtggcacaggcgcagaccggctgggttcaaaaccaaggaatacttccgggtatggtttggcaggacagagatgtgtacctgcaaggacccatttgggccaaaattcctcacacggacggcaactttcacccttctccgctgatgggagggtttggaatgaagcacccgcctcctcagatcctcatcaaaaacacacctgtacctgcggatcctccaacggccttcaacaagggcaagctgaactctttcatcacccagtattctactggccaagtcagcgtggagatcgagtgggagctgcagaaggaaaacagcaagcgctggaacccggagatccagtacacttccaactattacaagtctaataatgttgaatttgctgttaatactgaaggtgtatatagtgaaccccgccccattggcaccagatacctgactcgtaatctg

SEQ ID NO: 708 - protein, 736 aa, synthetic construct
  REGION 1..736: note = Adeno Associated Virus Capsid Protein Variant
MAADGYLPDWLEDNLSEGIREWWALKPGAPQPKANQQHQDNARGLVLPGYKYLGPGNGLDKGEPVNAADAAALEHDKAYDQQLKAGDNPYLKYNHADAEFQERLKEDTSFGGNLGRAVFQAKKRLLEPLGLVEEAAKTAPGKKRPVEQSPQEPDSSAGIGKSGAQPAKKRLNFGQTGDTESVPDPQPIGEPPAAPSGVGSLTMASGGGAPVADNNEGADGVGSSSGNWHCDSQWLGDRVITTSTRTWALPTYNNHLYKQISNSTSGGSSNDNAYFGYSTPWGYFDFNRFHCHFSPRDWQRLINNNWGFRPKRLNFKLFNIQVKEVTDNNGVKTIANNLTSTVQVFTDSDYQLPYVLGSAHEGCLPPFPADVFMIPQYGYLTLNDGSQAVGRSSFYCLEYFPSQMLRTGNNFQFSYEFENVPFHSSYAHSQSLDRLMNPLIDQYLYYLSKTINGSGQNQQTLKFSVAGPSNMAVQGRNYIPGPSYRQQRVSTTVTQNNNSEFAWPGASSWALNGRNSLMNPGPAMASHKEGEDRFFPLSGSLIFGKQGTGRDNVDADKVMITNEEEIKTTNPVATESYGQVATNHQSAVAQAQTGWVQNQGILPGMVWQDRDVYLQGPIWAKIPHTDGNFHPSPLMGGFGMKHPPPQILIKNTPVPADPPTAFNKGKLNSFITQYSTGQVSVEIEWELQKENSKRWNPEIQYTSNYYKSNNVEFAVNTEGVYSEPRPIGTRYLTRNL

SEQ ID NO: 709 - DNA, 2208 bp, synthetic construct
  misc_feature 1..2208: note = Adeno Associated Virus Capsid Protein Variant
  source 1..2208: mol_type = other DNA
atggctgccgatggttatcttccagattggctcgaggacaaccttagtgaaggaattcgcgagtggtgggctttgaaacctggagcccctcaacccaaggcaaatcaacaacatcaagacaacgctcgaggtcttgtgcttccgggttacaaataccttggacccggcaacggactcgacaagggggagccggtcaacgcagcagacgcggcggccctcgagcacgacaaggcctacgaccagcagctcaaggccggagacaacccgtacctcaagtacaaccacgccgacgccgagttccaggagcggctcaaagaagatacgtcttttgggggcaacctcgggcgagcagtcttccaggccaaaaagaggcttcttgaacctcttggtctggttgaggaagcggctaagacggctcctggaaagaagaggcctgtagagcagtctcctcaggaaccggactcctccgcgggtattggcaaatcgggtgcacagcccgctaaaaagagactcaatttcggtcagactggcgacacagagtcagtcccagaccctcaaccaatcggagaacctcccgcagccccctcaggtgtgggatctcttacaatggcttcaggtggtggcgcaccagtggcagacaataacgaaggtgccgatggagtgggtagttcctcgggaaattggcattgcgattcccaatggctgggggacagagtcatcaccaccagcacccgaacctgggccctgcccacctacaacaatcacctctacaagcaaatctccaacagcacatctggaggatcttcaaatgacaacgcctacttcggctacagcaccccctgggggtattttgacttcaacagattccactgccacttctcaccacgtgactggcagcgactcatcaacaacaactggggattccggcctaagcgactcaacttcaagctcttcaacattcaggtcaaagaggttacggacaacaatggagtcaagaccatcgccaataaccttaccagcacggtccaggtcttcacggactcagactatcagctcccgtacgtgctcgggtcggctcacgagggctgcctcccgccgttcccagcggacgttttcatgattcctcagtacgggtatctgacgcttaatgatggaagccaggccgtgggtcgttcgtccttttactgcctggaatatttcccgtcgcaaatgctaagaacgggtaacaacttccagttcagctacgagtttgagaacgtacctttccatagcagctacgctcacagccaaagcctggaccgactaatgaatccactcatcgaccaatacttgtactatctctcaaagactattaacggttctggacagaatcaacaaacgctaaaattcagtgtggccggacccagcaacatggctgtccagggaagaaactacatacctggacccagctaccgacaacaacgtgtctcaaccactgtgactcaaaacaacaacagcgaatttgcttggcctggagcttcttcttgggctctcaatggacgtaatagcttgatgaatcctggacctgctatggccagccacaaagaaggagaggaccgtttctttcctttgtctggatctttaatttttggcaaacaaggaactggaagagacaacgtggatgcggacaaagtcatgataaccaacgaagaagaaattaaaactactaacccggtagcaacggagtcctatggacaagtggccacaaaccaccagagtgcctcggcacaggcgcagaccggctgggttcaaaaccaaggaatacttccgggtatggtttggcaggacagagatgtgtacctgcaaggacccatttgggccaaaattcctcacacggacggcaactttcacccttctccgctgatgggagggtttggaatgaagcacccgcctcctcagatcctcatcaaaaacacacctgtacctgcggatcctccaacggccttcaacaagggcaagctgaactctttcatcacccagtattctactggccaagtcagcgtggagatcgagtgggagctgcagaaggaaaacagcaagcgctggaacccggagatccagtacacttccaactattacaagtctaataatgttgaatttgctgttaatactgaaggtgtatatagtgaaccccgccccattggcaccagatacctgactcgtaatctg

SEQ ID NO: 710 - protein, 736 aa, synthetic construct
  REGION 1..736: note = Adeno Associated Virus Capsid Protein Variant
MAADGYLPDWLEDNLSEGIREWWALKPGAPQPKANQQHQDNARGLVLPGYKYLGPGNGLDKGEPVNAADAAALEHDKAYDQQLKAGDNPYLKYNHADAEFQERLKEDTSFGGNLGRAVFQAKKRLLEPLGLVEEAAKTAPGKKRPVEQSPQEPDSSAGIGKSGAQPAKKRLNFGQTGDTESVPDPQPIGEPPAAPSGVGSLTMASGGGAPVADNNEGADGVGSSSGNWHCDSQWLGDRVITTSTRTWALPTYNNHLYKQISNSTSGGSSNDNAYFGYSTPWGYFDFNRFHCHFSPRDWQRLINNNWGFRPKRLNFKLFNIQVKEVTDNNGVKTIANNLTSTVQVFTDSDYQLPYVLGSAHEGCLPPFPADVFMIPQYGYLTLNDGSQAVGRSSFYCLEYFPSQMLRTGNNFQFSYEFENVPFHSSYAHSQSLDRLMNPLIDQYLYYLSKTINGSGQNQQTLKFSVAGPSNMAVQGRNYIPGPSYRQQRVSTTVTQNNNSEFAWPGASSWALNGRNSLMNPGPAMASHKEGEDRFFPLSGSLIFGKQGTGRDNVDADKVMITNEEEIKTTNPVATESYGQVATNHQSASAQAQTGWVQNQGILPGMVWQDRDVYLQGPIWAKIPHTDGNFHPSPLMGGFGMKHPPPQILIKNTPVPADPPTAFNKGKLNSFITQYSTGQVSVEIEWELQKENSKRWNPEIQYTSNYYKSNNVEFAVNTEGVYSEPRPIGTRYLTRNL

SEQ ID NO: 711 - DNA, 2208 bp, synthetic construct
  misc_feature 1..2208: note = Adeno Associated Virus Capsid Protein Variant
  source 1..2208: mol_type = other DNA
atggctgccgatggttatcttccagattggctcgaggacaaccttagtgaaggaattcgcgagtggtgggctttgaaacctggagcccctcaacccaaggcaaatcaacaacatcaagacaacgctcgaggtcttgtgcttccgggttacaaataccttggacccggcaacggactcgacaagggggagccggtcaacgcagcagacgcggcggccctcgagcacgacaaggcctacgaccagcagctcaaggccggagacaacccgtacctcaagtacaaccacgccgacgccgagttccaggagcggctcaaagaagatacgtcttttgggggcaacctcgggcgagcagtcttccaggccaaaaagaggcttcttgaacctcttggtctggttgaggaagcggctaagacggctcctggaaagaagaggcctgtagagcagtctcctcaggaaccggactcctccgcgggtattggcaaatcgggtgcacagcccgctaaaaagagactcaatttcggtcagactggcgacacagagtcagtcccagaccctcaaccaatcggagaacctcccgcagccccctcaggtgtgggatctcttacaatggcttcaggtggtggcgcaccagtggcagacaataacgaaggtgccgatggagtgggtagttcctcgggaaattggcattgcgattcccaatggctgggggacagagtcatcaccaccagcacccgaacctgggccctgcccacctacaacaatcacctctacaagcaaatctccaacagcacatctggaggatcttcaaatgacaacgcctacttcggctacagcaccccctgggggtattttgacttcaacagattccactgccacttctcaccacgtgactggcagcgactcatcaacaacaactggggattccggcctaagcgactcaacttcaagctcttcaacattcaggtcaaagaggttacggacaacaatggagtcaagaccatcgccaataaccttaccagcacggtccaggtcttcacggactcagactatcagctcccgtacgtgctcgggtcggctcacgagggctgcctcccgccgttcccagcggacgttttcatgattcctcagtacgggtatctgacgcttaatgatggaagccaggccgtgggtcgttcgtccttttactgcctggaatatttcccgtcgcaaatgctaagaacgggtaacaacttccagttcagctacgagtttgagaacgtacctttccatagcagctacgctcacagccaaagcctggaccgactaatgaatccactcatcgaccaatacttgtactatctctcaaagactattaacggttctggacagaatcaacaaacgctaaaattcagtgtggccggacccagcaacatggctgtccagggaagaaactacatacctggacccagctaccgacaacaacgtgtctcaaccactgtgactcaaaacaacaacagcgaatttgcttggcctggagcttcttcttgggctctcaatggacgtaatagcttgatgaatcctggacctgctatggccagccacaaagaaggagaggaccgtttctttcctttgtctggatctttaatttttggcaaacaaggaactggaagagacaacgtggatgcggacaaagtcatgataaccaacgaagaagaaattaaaactactaacccggtagcaacggagtcctatggacaagtggccacaaaccaccagagtcagcgggcacaggcgcagaccggctgggttcaaaaccaaggaatacttccgggtatggtttggcaggacagagatgtgtacctgcaaggacccatttgggccaaaattcctcacacggacggcaactttcacccttctccgctgatgggagggtttggaatgaagcacccgcctcctcagatcctcatcaaaaacacacctgtacctgcggatcctccaacggccttcaacaagggcaagctgaactctttcatcacccagtattctactggccaagtcagcgtggagatcgagtgggagctgcagaaggaaaacagcaagcgctggaacccggagatccagtacacttccaactattacaagtctaataatgttgaatttgctgttaatactgaaggtgtatatagtgaaccccgccccattggcaccagatacctgactcgtaatctg

SEQ ID NO: 712 - protein, 736 aa, synthetic construct
  REGION 1..736: note = Adeno Associated Virus Capsid Protein Variant
MAADGYLPDWLEDNLSEGIREWWALKPGAPQPKANQQHQDNARGLVLPGYKYLGPGNGLDKGEPVNAADAAALEHDKAYDQQLKAGDNPYLKYNHADAEFQERLKEDTSFGGNLGRAVFQAKKRLLEPLGLVEEAAKTAPGKKRPVEQSPQEPDSSAGIGKSGAQPAKKRLNFGQTGDTESVPDPQPIGEPPAAPSGVGSLTMASGGGAPVADNNEGADGVGSSSGNWHCDSQWLGDRVITTSTRTWALPTYNNHLYKQISNSTSGGSSNDNAYFGYSTPWGYFDFNRFHCHFSPRDWQRLINNNWGFRPKRLNFKLFNIQVKEVTDNNGVKTIANNLTSTVQVFTDSDYQLPYVLGSAHEGCLPPFPADVFMIPQYGYLTLNDGSQAVGRSSFYCLEYFPSQMLRTGNNFQFSYEFENVPFHSSYAHSQSLDRLMNPLIDQYLYYLSKTINGSGQNQQTLKFSVAGPSNMAVQGRNYIPGPSYRQQRVSTTVTQNNNSEFAWPGASSWALNGRNSLMNPGPAMASHKEGEDRFFPLSGSLIFGKQGTGRDNVDADKVMITNEEEIKTTNPVATESYGQVATNHQSQRAQAQTGWVQNQGILPGMVWQDRDVYLQGPIWAKIPHTDGNFHPSPLMGGFGMKHPPPQILIKNTPVPADPPTAFNKGKLNSFITQYSTGQVSVEIEWELQKENSKRWNPEIQYTSNYYKSNNVEFAVNTEGVYSEPRPIGTRYLTRNL

SEQ ID NO: 713 - DNA, 2208 bp, synthetic construct
  misc_feature 1..2208: note = Adeno Associated Virus Capsid Protein Variant
  source 1..2208: mol_type = other DNA
atggctgccgatggttatcttccagattggctcgaggacaaccttagtgaaggaattcgcgagtggtgggctttgaaacctggagcccctcaacccaaggcaaatcaacaacatcaagacaacgctcgaggtcttgtgcttccgggttacaaataccttggacccggcaacggactcgacaagggggagccggtcaacgcagcagacgcggcggccctcgagcacgacaaggcctacgaccagcagctcaaggccggagacaacccgtacctcaagtacaaccacgccgacgccgagttccaggagcggctcaaagaagatacgtcttttgggggcaacctcgggcgagcagtcttccaggccaaaaagaggcttcttgaacctcttggtctggttgaggaagcggctaagacggctcctggaaagaagaggcctgtagagcagtctcctcaggaaccggactcctccgcgggtattggcaaatcgggtgcacagcccgctaaaaagagactcaatttcggtcagactggcgacacagagtcagtcccagaccctcaaccaatcggagaacctcccgcagccccctcaggtgtgggatctcttacaatggcttcaggtggtggcgcaccagtggcagacaataacgaaggtgccgatggagtgggtagttcctcgggaaattggcattgcgattcccaatggctgggggacagagtcatcaccaccagcacccgaacctgggccctgcccacctacaacaatcacctctacaagcaaatctccaacagcacatctggaggatcttcaaatgacaacgcctacttcggctacagcaccccctgggggtattttgacttcaacagattccactgccacttctcaccacgtgactggcagcgactcatcaacaacaactggggattccggcctaagcgactcaacttcaagctcttcaacattcaggtcaaagaggttacggacaacaatggagtcaagaccatcgccaataaccttaccagcacggtccaggtcttcacggactcagactatcagctcccgtacgtgctcgggtcggctcacgagggctgcctcccgccgttcccagcggacgttttcatgattcctcagtacgggtatctgacgcttaatgatggaagccaggccgtgggtcgttcgtccttttactgcctggaatatttcccgtcgcaaatgctaagaacgggtaacaacttccagttcagctacgagtttgagaacgtacctttccatagcagctacgctcacagccaaagcctggaccgactaatgaatccactcatcgaccaatacttgtactatctctcaaagactattaacggttctggacagaatcaacaaacgctaaaattcagtgtggccggacccagcaacatggctgtccagggaagaaactacatacctggacccagctaccgacaacaacgtgtctcaaccactgtgactcaaaacaacaacagcgaatttgcttggcctggagcttcttcttgggctctcaatggacgtaatagcttgatgaatcctggacctgctatggccagccacaaagaaggagaggaccgtttctttcctttgtctggatctttaatttttggcaaacaaggaactggaagagacaacgtggatgcggacaaagtcatgataaccaacgaagaagaaattaaaactactaacccggtagcaacggagtcctatggacaagtggccacaaaccaccagagtgccaccgcacaggcgcagaccggctgggttcaaaaccaaggaatacttccgggtatggtttggcaggacagagatgtgtacctgcaaggacccatttgggccaaaattcctcacacggacggcaactttcacccttctccgctgatgggagggtttggaatgaagcacccgcctcctcagatcctcatcaaaaacacacctgtacctgcggatcctccaacggccttcaacaagggcaagctgaactctttcatcacccagtattctactggccaagtcagcgtggagatcgagtgggagctgcagaaggaaaacagcaagcgctggaacccggagatccagtacacttccaactattacaagtctaataatgttgaatttgctgttaatactgaaggtgtatatagtgaaccccgccccattggcaccagatacctgactcgtaatctg

SEQ ID NO: 714 - protein, 736 aa, synthetic construct
  REGION 1..736: note = Adeno Associated Virus Capsid Protein Variant
MAADGYLPDWLEDNLSEGIREWWALKPGAPQPKANQQHQDNARGLVLPGYKYLGPGNGLDKGEPVNAADAAALEHDKAYDQQLKAGDNPYLKYNHADAEFQERLKEDTSFGGNLGRAVFQAKKRLLEPLGLVEEAAKTAPGKKRPVEQSPQEPDSSAGIGKSGAQPAKKRLNFGQTGDTESVPDPQPIGEPPAAPSGVGSLTMASGGGAPVADNNEGADGVGSSSGNWHCDSQWLGDRVITTSTRTWALPTYNNHLYKQISNSTSGGSSNDNAYFGYSTPWGYFDFNRFHCHFSPRDWQRLINNNWGFRPKRLNFKLFNIQVKEVTDNNGVKTIANNLTSTVQVFTDSDYQLPYVLGSAHEGCLPPFPADVFMIPQYGYLTLNDGSQAVGRSSFYCLEYFPSQMLRTGNNFQFSYEFENVPFHSSYAHSQSLDRLMNPLIDQYLYYLSKTINGSGQNQQTLKFSVAGPSNMAVQGRNYIPGPSYRQQRVSTTVTQNNNSEFAWPGASSWALNGRNSLMNPGPAMASHKEGEDRFFPLSGSLIFGKQGTGRDNVDADKVMITNEEEIKTTNPVATESYGQVATNHQSATAQAQTGWVQNQGILPGMVWQDRDVYLQGPIWAKIPHTDGNFHPSPLMGGFGMKHPPPQILIKNTPVPADPPTAFNKGKLNSFITQYSTGQVSVEIEWELQKENSKRWNPEIQYTSNYYKSNNVEFAVNTEGVYSEPRPIGTRYLTRNL

SEQ ID NO: 715 - DNA, 2208 bp, synthetic construct
  misc_feature 1..2208: note = Adeno Associated Virus Capsid Protein Variant
  source 1..2208: mol_type = other DNA
atggctgccgatggttatcttccagattggctcgaggacaaccttagtgaaggaattcgcgagtggtgggctttgaaacctggagcccctcaacccaaggcaaatcaacaacatcaagacaacgctcgaggtcttgtgcttccgggttacaaataccttggacccggcaacggactcgacaagggggagccggtcaacgcagcagacgcggcggccctcgagcacgacaaggcctacgaccagcagctcaaggccggagacaacccgtacctcaagtacaaccacgccgacgccgagttccaggagcggctcaaagaagatacgtcttttgggggcaacctcgggcgagcagtcttccaggccaaaaagaggcttcttgaacctcttggtctggttgaggaagcggctaagacggctcctggaaagaagaggcctgtagagcagtctcctcaggaaccggactcctccgcgggtattggcaaatcgggtgcacagcccgctaaaaagagactcaatttcggtcagactggcgacacagagtcagtcccagaccctcaaccaatcggagaacctcccgcagccccctcaggtgtgggatctcttacaatggcttcaggtggtggcgcaccagtggcagacaataacgaaggtgccgatggagtgggtagttcctcgggaaattggcattgcgattcccaatggctgggggacagagtcatcaccaccagcacccgaacctgggccctgcccacctacaacaatcacctctacaagcaaatctccaacagcacatctggaggatcttcaaatgacaacgcctacttcggctacagcaccccctgggggtattttgacttcaacagattccactgccacttctcaccacgtgactggcagcgactcatcaacaacaactggggattccggcctaagcgactcaacttcaagctcttcaacattcaggtcaaagaggttacggacaacaatggagtcaagaccatcgccaataaccttaccagcacggtccaggtcttcacggactcagactatcagctcccgtacgtgctcgggtcggctcacgagggctgcctcccgccgttcccagcggacgttttcatgattcctcagtacgggtatctgacgcttaatgatggaagccaggccgtgggtcgttcgtccttttactgcctggaatatttcccgtcgcaaatgctaagaacgggtaacaacttccagttcagctacgagtttgagaacgtacctttccatagcagctacgctcacagccaaagcctggaccgactaatgaatccactcatcgaccaatacttgtactatctctcaaagactattaacggttctggacagaatcaacaaacgctaaaattcagtgtggccggacccagcaacatggctgtccagggaagaaactacatacctggacccagctaccgacaacaacgtgtctcaaccactgtgactcaaaacaacaacagcgaatttgcttggcctggagcttcttcttgggctctcaatggacgtaatagcttgatgaatcctggacctgctatggccagccacaaagaaggagaggaccgtttctttcctttgtctggatctttaatttttggcaaacaaggaactggaagagacaacgtggatgcggacaaagtcatgataacccgtgaagaagaaattaaaactactaacccggtagcaacggagtcctatggacaagtggccacaaaccaccagagtgcccgggcacaggcgcagaccggctgggttcaaaaccaaggaatacttccgggtatggtttggcaggacagagatgtgtacctgcaaggacccatttgggccaaaattcctcacacggacggcaactttcacccttctccgctgatgggagggtttggaatgaagcacccgcctcctcagatcctcatcaaaaacacacctgtacctgcggatcctccaacggccttcaacaagggcaagctgaactctttcatcacccagtattctactggccaagtcagcgtggagatcgagtgggagctgcagaaggaaaacagcaagcgctggaacccggagatccagtacacttccaactattacaagtctaataatgttgaatttgctgttaatactgaaggtgtatatagtgaaccccgccccattggcaccagatacctgactcgtaatctg

SEQ ID NO: 716 - protein, 736 aa, synthetic construct
  REGION 1..736: note = Adeno Associated Virus Capsid Protein Variant
MAADGYLPDWLEDNLSEGIREWWALKPGAPQPKANQQHQDNARGLVLPGYKYLGPGNGLDKGEPVNAADAAALEHDKAYDQQLKAGDNPYLKYNHADAEFQERLKEDTSFGGNLGRAVFQAKKRLLEPLGLVEEAAKTAPGKKRPVEQSPQEPDSSAGIGKSGAQPAKKRLNFGQTGDTESVPDPQPIGEPPAAPSGVGSLTMASGGGAPVADNNEGADGVGSSSGNWHCDSQWLGDRVITTSTRTWALPTYNNHLYKQISNSTSGGSSNDNAYFGYSTPWGYFDFNRFHCHFSPRDWQRLINNNWGFRPKRLNFKLFNIQVKEVTDNNGVKTIANNLTSTVQVFTDSDYQLPYVLGSAHEGCLPPFPADVFMIPQYGYLTLNDGSQAVGRSSFYCLEYFPSQMLRTGNNFQFSYEFENVPFHSSYAHSQSLDRLMNPLIDQYLYYLSKTINGSGQNQQTLKFSVAGPSNMAVQGRNYIPGPSYRQQRVSTTVTQNNNSEFAWPGASSWALNGRNSLMNPGPAMASHKEGEDRFFPLSGSLIFGKQGTGRDNVDADKVMITREEEIKTTNPVATESYGQVATNHQSARAQAQTGWVQNQGILPGMVWQDRDVYLQGPIWAKIPHTDGNFHPSPLMGGFGMKHPPPQILIKNTPVPADPPTAFNKGKLNSFITQYSTGQVSVEIEWELQKENSKRWNPEIQYTSNYYKSNNVEFAVNTEGVYSEPRPIGTRYLTRNL

SEQ ID NO: 717 - DNA, 2208 bp, synthetic construct
  misc_feature 1..2208: note = Adeno Associated Virus Capsid Protein Variant
  source 1..2208: mol_type = other DNA
atggctgccgatggttatcttccagattggctcgaggacaaccttagtgaaggaattcgcgagtggtgggctttgaaacctggagcccctcaacccaaggcaaatcaacaacatcaagacaacgctcgaggtcttgtgcttccgggttacaaataccttggacccggcaacggactcgacaagggggagccggtcaacgcagcagacgcggcggccctcgagcacgacaaggcctacgaccagcagctcaaggccggagacaacccgtacctcaagtacaaccacgccgacgccgagttccaggagcggctcaaagaagatacgtcttttgggggcaacctcgggcgagcagtcttccaggccaaaaagaggcttcttgaacctcttggtctggttgaggaagcggctaagacggctcctggaaagaagaggcctgtagagcagtctcctcaggaaccggactcctccgcgggtattggcaaatcgggtgcacagcccgctaaaaagagactcaatttcggtcagactggcgacacagagtcagtcccagaccctcaaccaatcggagaacctcccgcagccccctcaggtgtgggatctcttacaatggcttcaggtggtggcgcaccagtggcagacaataacgaaggtgccgatggagtgggtagttcctcgggaaattggcattgcgattcccaatggctgggggacagagtcatcaccaccagcacccgaacctgggccctgcccacctacaacaatcacctctacaagcaaatctccaacagcacatctggaggatcttcaaatgacaacgcctacttcggctacagcaccccctgggggtattttgacttcaacagattccactgccacttctcaccacgtgactggcagcgactcatcaacaacaactggggattccggcctaagcgactcaacttcaagctcttcaacattcaggtcaaagaggttacggacaacaatggagtcaagaccatcgccaataaccttaccagcacggtccaggtcttcacggactcagactatcagctcccgtacgtgctcgggtcggctcacgagggctgcctcccgccgttcccagcggacgttttcatgattcctcagtacgggtatctgacgcttaatgatggaagccaggccgtgggtcgttcgtccttttactgcctggaatatttcccgtcgcaaatgctaagaacgggtaacaacttccagttcagctacgagtttgagaacgtacctttccatagcagctacgctcacagccaaagcctggaccgactaatgaatccactcatcgaccaatacttgtactatctctcaaagactattaacggttctggacagaatcaacaaacgctaaaattcagtgtggccggacccagcaacatggctgtccagggaagaaactacatacctggacccagctaccgacaacaacgtgtctcaaccactgtgactcaaaacaacaacagcgaatttgcttggcctggagcttcttcttgggctctcaatggacgtaatagcttgatgaatcctggacctgctatggccagccacaaagaaggagaggaccgtttctttcctttgtctggatctttaatttttggcaaacaaggaactggaagagacaacgtggatgcggacaaagtcatgataaccaacgaagaaaaaattaaaactactaacccggtagcaacggagtcctatggacaagtggccacaaaccaccagagtgcccgggcacaggcgcagaccggctgggttcaaaaccaaggaatacttccgggtatggtttggcaggacagagatgtgtacctgcaaggacccatttgggccaaaattcctcacacggacggcaactttcacccttctccgctgatgggagggtttggaatgaagcacccgcctcctcagatcctcatcaaaaacacacctgtacctgcggatcctccaacggccttcaacaagggcaagctgaactctttcatcacccagtattctactggccaagtcagcgtggagatcgagtgggagctgcagaaggaaaacagcaagcgctggaacccggagatccagtacacttccaactattacaagtctaataatgttgaatttgctgttaatactgaaggtgtatatagtgaaccccgccccattggcaccagatacctgactcgtaatctg

SEQ ID NO: 718 - protein, 736 aa, synthetic construct
  REGION 1..736: note = Adeno Associated Virus Capsid Protein Variant
MAADGYLPDWLEDNLSEGIREWWALKPGAPQPKANQQHQDNARGLVLPGYKYLGPGNGLDKGEPVNAADAAALEHDKAYDQQLKAGDNPYLKYNHADAEFQERLKEDTSFGGNLGRAVFQAKKRLLEPLGLVEEAAKTAPGKKRPVEQSPQEPDSSAGIGKSGAQPAKKRLNFGQTGDTESVPDPQPIGEPPAAPSGVGSLTMASGGGAPVADNNEGADGVGSSSGNWHCDSQWLGDRVITTSTRTWALPTYNNHLYKQISNSTSGGSSNDNAYFGYSTPWGYFDFNRFHCHFSPRDWQRLINNNWGFRPKRLNFKLFNIQVKEVTDNNGVKTIANNLTSTVQVFTDSDYQLPYVLGSAHEGCLPPFPADVFMIPQYGYLTLNDGSQAVGRSSFYCLEYFPSQMLRTGNNFQFSYEFENVPFHSSYAHSQSLDRLMNPLIDQYLYYLSKTINGSGQNQQTLKFSVAGPSNMAVQGRNYIPGPSYRQQRVSTTVTQNNNSEFAWPGASSWALNGRNSLMNPGPAMASHKEGEDRFFPLSGSLIFGKQGTGRDNVDADKVMITNEEKIKTTNPVATESYGQVATNHQSARAQAQTGWVQNQGILPGMVWQDRDVYLQGPIWAKIPHTDGNFHPSPLMGGFGMKHPPPQILIKNTPVPADPPTAFNKGKLNSFITQYSTGQVSVEIEWELQKENSKRWNPEIQYTSNYYKSNNVEFAVNTEGVYSEPRPIGTRYLTRNL

SEQ ID NO: 719 - DNA, 2208 bp, synthetic construct
  misc_feature 1..2208: note = Adeno Associated Virus Capsid Protein Variant
  source 1..2208: mol_type = other DNA
atggctgccgatggttatcttccagattggctcgaggacaaccttagtgaaggaattcgcgagtggtgggctttgaaacctggagcccctcaacccaaggcaaatcaacaacatcaagacaacgctcgaggtcttgtgcttccgggttacaaataccttggacccggcaacggactcgacaagggggagccggtcaacgcagcagacgcggcggccctcgagcacgacaaggcctacgaccagcagctcaaggccggagacaacccgtacctcaagtacaaccacgccgacgccgagttccaggagcggctcaaagaagatacgtcttttgggggcaacctcgggcgagcagtcttccaggccaaaaagaggcttcttgaacctcttggtctggttgaggaagcggctaagacggctcctggaaagaagaggcctgtagagcagtctcctcaggaaccggactcctccgcgggtattggcaaatcgggtgcacagcccgctaaaaagagactcaatttcggtcagactggcgacacagagtcagtcccagaccctcaaccaatcggagaacctcccgcagccccctcaggtgtgggatctcttacaatggcttcaggtggtggcgcaccagtggcagacaataacgaaggtgccgatggagtgggtagttcctcgggaaattggcattgcgattcccaatggctgggggacagagtcatcaccaccagcacccgaacctgggccctgcccacctacaacaatcacctctacaagcaaatctccaacagcacatctggaggatcttcaaatgacaacgcctacttcggctacagcaccccctgggggtattttgacttcaacagattccactgccacttctcaccacgtgactggcagcgactcatcaacaacaactggggattccggcctaagcgactcaacttcaagctcttcaacattcaggtcaaagaggttacggacaacaatggagtcaagaccatcgccaataaccttaccagcacggtccaggtcttcacggactcagactatcagctcccgtacgtgctcgggtcggctcacgagggctgcctcccgccgttcccagcggacgttttcatgattcctcagtacgggtatctgacgcttaatgatggaagccaggccgtgggtcgttcgtccttttactgcctggaatatttcccgtcgcaaatgctaagaacgggtaacaacttccagttcagctacgagtttgagaacgtacctttccatagcagctacgctcacagccaaagcctggaccgactaatgaatccactcatcgaccaatacttgtactatctctcaaagactattaacggttctggacagaatcaacaaacgctaaaattcagtgtggccggacccagcaacatggctgtccagggaagaaactacatacctggacccagctaccgacaacaacgtgtctcaaccactgtgactcaaaacaacaacagcgaatttgcttggcctggagcttcttcttgggctctcaatggacgtaatagcttgatgaatcctggacctgctatggccagccacaaagaaggagaggaccgtttctttcctttgtctggatctttaatttttggcaaacaaggaactggaagagacaacgtggatgcggacaaagtcatgataaccaacgaagaagaaattaaaactactaacccggtagcaacggagtcctatggacaagtggccacaaaccaccagagtgcccggtaccaggcgcagaccggctgggttcaaaaccaaggaatacttccgggtatggtttggcaggacagagatgtgtacctgcaaggacccatttgggccaaaattcctcacacggacggcaactttcacccttctccgctgatgggagggtttggaatgaagcacccgcctcctcagatcctcatcaaaaacacacctgtacctgcggatcctccaacggccttcaacaagggcaagctgaactctttcatcacccagtattctactggccaagtcagcgtggagatcgagtgggagctgcagaaggaaaacagcaagcgctggaacccggagatccagtacacttccaactattacaagtctaataatgttgaatttgctgttaatactgaaggtgtatatagtgaaccccgccccattggcaccagatacctgactcgtaatctg

SEQ ID NO: 720 - protein, 736 aa, synthetic construct
  REGION 1..736: note = Adeno Associated Virus Capsid Protein Variant
MAADGYLPDWLEDNLSEGIREWWALKPGAPQPKANQQHQDNARGLVLPGYKYLGPGNGLDKGEPVNAADAAALEHDKAYDQQLKAGDNPYLKYNHADAEFQERLKEDTSFGGNLGRAVFQAKKRLLEPLGLVEEAAKTAPGKKRPVEQSPQEPDSSAGIGKSGAQPAKKRLNFGQTGDTESVPDPQPIGEPPAAPSGVGSLTMASGGGAPVADNNEGADGVGSSSGNWHCDSQWLGDRVITTSTRTWALPTYNNHLYKQISNSTSGGSSNDNAYFGYSTPWGYFDFNRFHCHFSPRDWQRLINNNWGFRPKRLNFKLFNIQVKEVTDNNGVKTIANNLTSTVQVFTDSDYQLPYVLGSAHEGCLPPFPADVFMIPQYGYLTLNDGSQAVGRSSFYCLEYFPSQMLRTGNNFQFSYEFENVPFHSSYAHSQSLDRLMNPLIDQYLYYLSKTINGSGQNQQTLKFSVAGPSNMAVQGRNYIPGPSYRQQRVSTTVTQNNNSEFAWPGASSWALNGRNSLMNPGPAMASHKEGEDRFFPLSGSLIFGKQGTGRDNVDADKVMITNEEEIKTTNPVATESYGQVATNHQSARYQAQTGWVQNQGILPGMVWQDRDVYLQGPIWAKIPHTDGNFHPSPLMGGFGMKHPPPQILIKNTPVPADPPTAFNKGKLNSFITQYSTGQVSVEIEWELQKENSKRWNPEIQYTSNYYKSNNVEFAVNTEGVYSEPRPIGTRYLTRNL

SEQ ID NO: 721 - DNA, 2208 bp, synthetic construct
  misc_feature 1..2208: note = Adeno Associated Virus Capsid Protein Variant
  source 1..2208: mol_type = other DNA
atggctgccgatggttatcttccagattggctcgaggacaaccttagtgaaggaattcgcgagtggtgggctttgaaacctggagcccctcaacccaaggcaaatcaacaacatcaagacaacgctcgaggtcttgtgcttccgggttacaaataccttggacccggcaacggactcgacaagggggagccggtcaacgcagcagacgcggcggccctcgagcacgacaaggcctacgaccagcagctcaaggccggagacaacccgtacctcaagtacaaccacgccgacgccgagttccaggagcggctcaaagaagatacgtcttttgggggcaacctcgggcgagcagtcttccaggccaaaaagaggcttcttgaacctcttggtctggttgaggaagcggctaagacggctcctggaaagaagaggcctgtagagcagtctcctcaggaaccggactcctccgcgggtattggcaaatcgggtgcacagcccgctaaaaagagactcaatttcggtcagactggcgacacagagtcagtcccagaccctcaaccaatcggagaacctcccgcagccccctcaggtgtgggatctcttacaatggcttcaggtggtggcgcaccagtggcagacaataacgaaggtgccgatggagtgggtagttcctcgggaaattggcattgcgattcccaatggctgggggacagagtcatcaccaccagcacccgaacctgggccctgcccacctacaacaatcacctctacaagcaaatctccaacagcacatctggaggatcttcaaatgacaacgcctacttcggctacagcaccccctgggggtattttgacttcaacagattccactgccacttctcaccacgtgactggcagcgactcatcaacaacaactggggattccggcctaagcgactcaacttcaagctcttcaacattcaggtcaaagaggttacggacaacaatggagtcaagaccatcgccaataaccttaccagcacggtccaggtcttcacggactcagactatcagctcccgtacgtgctcgggtcggctcacgagggctgcctcccgccgttcccagcggacgttttcatgattcctcagtacgggtatctgacgcttaatgatggaagccaggccgtgggtcgttcgtccttttactgcctggaatatttcccgtcgcaaatgctaagaacgggtaacaacttccagttcagctacgagtttgagaacgtacctttccatagcagctacgctcacagccaaagcctggaccgactaatgaatccactcatcgaccaatacttgtactatctctcaaagactattaacggttctggacagaatcaacaaacgctaaaattcagtgtggccggacccagcaacatggctgtccagggaagaaactacatacctggacccagctaccgacaacaacgtgtctcaaccactgtgacttttaacagcaacagcgaatttgcttggcctggagcttcttcttgggctctcaatggacgtaatagcttgatgaatcctggacctgctatggccagccacaaagaaggagaggaccgtttctttcctttgtctggatctttaatttttggcaaacaaggaactggaagagacaacgtggatgcggacaaagtcatgataaccaacgaagaagaaattaaaactactaacccggtagcaacggagtcctatggacaagtggccacaaaccaccagagtgcccgggcacaggcgcagaccggctgggttcaaaaccaaggaatacttccgggtatggtttggcaggacagagatgtgtacctgcaaggacccatttgggccaaaattcctcacacggacggcaactttcacccttctccgctgatgggagggtttggaatgaagcacccgcctcctcagatcctcatcaaaaacacacctgtacctgcggatcctccaacggccttcaacaagggcaagctgaactctttcatcacccagtattctactggccaagtcagcgtggagatcgagtgggagctgcagaaggaaaacagcaagcgctggaacccggagatccagtacacttccaactattacaagtctaataatgttgaatttgctgttaatactgaaggtgtatatagtgaaccccgccccattggcaccagatacctgactcgtaatctg

SEQ ID NO: 722 - protein, 736 aa, synthetic construct
  REGION 1..736: note = Adeno Associated Virus Capsid Protein Variant
MAADGYLPDWLEDNLSEGIREWWALKPGAPQPKANQQHQDNARGLVLPGYKYLGPGNGLDKGEPVNAADAAALEHDKAYDQQLKAGDNPYLKYNHADAEFQERLKEDTSFGGNLGRAVFQAKKRLLEPLGLVEEAAKTAPGKKRPVEQSPQEPDSSAGIGKSGAQPAKKRLNFGQTGDTESVPDPQPIGEPPAAPSGVGSLTMASGGGAPVADNNEGADGVGSSSGNWHCDSQWLGDRVITTSTRTWALPTYNNHLYKQISNSTSGGSSNDNAYFGYSTPWGYFDFNRFHCHFSPRDWQRLINNNWGFRPKRLNFKLFNIQVKEVTDNNGVKTIANNLTSTVQVFTDSDYQLPYVLGSAHEGCLPPFPADVFMIPQYGYLTLNDGSQAVGRSSFYCLEYFPSQMLRTGNNFQFSYEFENVPFHSSYAHSQSLDRLMNPLIDQYLYYLSKTINGSGQNQQTLKFSVAGPSNMAVQGRNYIPGPSYRQQRVSTTVTFNSNSEFAWPGASSWALNGRNSLMNPGPAMASHKEGEDRFFPLSGSLIFGKQGTGRDNVDADKVMITNEEEIKTTNPVATESYGQVATNHQSARAQAQTGWVQNQGILPGMVWQDRDVYLQGPIWAKIPHTDGNFHPSPLMGGFGMKHPPPQILIKNTPVPADPPTAFNKGKLNSFITQYSTGQVSVEIEWELQKENSKRWNPEIQYTSNYYKSNNVEFAVNTEGVYSEPRPIGTRYLTRNL

SEQ ID NO: 723 - DNA, 2208 bp, synthetic construct
  misc_feature 1..2208: note = Adeno Associated Virus Capsid Protein Variant
  source 1..2208: mol_type = other DNA
atggctgccgatggttatcttccagattggctcgaggacaaccttagtgaaggaattcgcgagtggtgggctttgaaacctggagcccctcaacccaaggcaaatcaacaacatcaagacaacgctcgaggtcttgtgcttccgggttacaaataccttggacccggcaacggactcgacaagggggagccggtcaacgcagcagacgcggcggccctcgagcacgacaaggcctacgaccagcagctcaaggccggagacaacccgtacctcaagtacaaccacgccgacgccgagttccaggagcggctcaaagaagatacgtcttttgggggcaacctcgggcgagcagtcttccaggccaaaaagaggcttcttgaacctcttggtctggttgaggaagcggctaagacggctcctggaaagaagaggcctgtagagcagtctcctcaggaaccggactcctccgcgggtattggcaaatcgggtgcacagcccgctaaaaagagactcaatttcggtcagactggcgacacagagtcagtcccagaccctcaaccaatcggagaacctcccgcagccccctcaggtgtgggatctcttacaatggcttcaggtggtggcgcaccagtggcagacaataacgaaggtgccgatggagtgggtagttcctcgggaaattggcattgcgattcccaatggctgggggacagagtcatcaccaccagcacccgaacctgggccctgcccacctacaacaatcacctctacaagcaaatctccaacagcacatctggaggatcttcaaatgacaacgcctacttcggctacagcaccccctgggggtattttgacttcaacagattccactgccacttctcaccacgtgactggcagcgactcatcaacaacaactggggattccggcctaagcgactcaacttcaagctcttcaacattcaggtcaaagaggttacggacaacaatggagtcaagaccatcgccaataaccttaccagcacggtccaggtcttcacggactcagactatcagctcccgtacgtgctcgggtcggctcacgagggctgcctcccgccgttcccagcggacgttttcatgattcctcagtacgggtatctgacgcttaatgatggaagccaggccgtgggtcgttcgtccttttactgcctggaatatttcccgtcgcaaatgctaagaacgggtaacaacttccagttcagctacgagtttgagaacgtacctttccatagcagctacgctcacagccaaagcctggaccgactaatgaatccactcatcgaccaatacttgtactatctctcaaagactattaacggttctggacagggccaacaaacgctaaaattcagtgtggccggacccagcaacatggctgtccagggaagaaactacatacctggacccagctaccgacaacaacgtgtctcaaccactgtgacttttaacaacaacagcgaatttgcttggcctggagcttcttcttgggctctcaatggacgtaatagcttgatgaatcctggacctgctatggccagccacaaagaaggagaggaccgtttctttcctttgtctggatctttaatttttggcaaacaaggaactggaagagacaacgtggatgcggacaaagtcatgataaccaacgaagaagaaattaaaactactaacccggtagcaacggagtcctatggacaagtggccacaaaccaccagagtgcccgggcacaggcgcagaccggctgggttcaaaaccaaggaatacttccgggtatggtttggcaggacagagatgtgtacctgcaaggacccatttgggccaaaattcctcacacggacggcaactttcacccttctccgctgatgggagggtttggaatgaagcacccgcctcctcagatcctcatcaaaaacacacctgtacctgcggatcctccaacggccttcaacaagggcaagctgaactctttcatcacccagtattctactggccaagtcagcgtggagatcgagtgggagctgcagaaggaaaacagcaagcgctggaacccggagatccagtacacttccaactattacaagtctaataatgttgaatttgctgttaatactgaaggtgtatatagtgaacccggacccattggcaccagatacctgactcgtaatctg

SEQ ID NO: 724 - protein, 736 aa, synthetic construct
  REGION 1..736: note = Adeno Associated Virus Capsid Protein Variant
MAADGYLPDWLEDNLSEGIREWWALKPGAPQPKANQQHQDNARGLVLPGYKYLGPGNGLDKGEPVNAADAAALEHDKAYDQQLKAGDNPYLKYNHADAEFQERLKEDTSFGGNLGRAVFQAKKRLLEPLGLVEEAAKTAPGKKRPVEQSPQEPDSSAGIGKSGAQPAKKRLNFGQTGDTESVPDPQPIGEPPAAPSGVGSLTMASGGGAPVADNNEGADGVGSSSGNWHCDSQWLGDRVITTSTRTWALPTYNNHLYKQISNSTSGGSSNDNAYFGYSTPWGYFDFNRFHCHFSPRDWQRLINNNWGFRPKRLNFKLFNIQVKEVTDNNGVKTIANNLTSTVQVFTDSDYQLPYVLGSAHEGCLPPFPADVFMIPQYGYLTLNDGSQAVGRSSFYCLEYFPSQMLRTGNNFQFSYEFENVPFHSSYAHSQSLDRLMNPLIDQYLYYLSKTINGSGQGQQTLKFSVAGPSNMAVQGRNYIPGPSYRQQRVSTTVTFNNNSEFAWPGASSWALNGRNSLMNPGPAMASHKEGEDRFFPLSGSLIFGKQGTGRDNVDADKVMITNEEEIKTTNPVATESYGQVATNHQSARAQAQTGWVQNQGILPGMVWQDRDVYLQGPIWAKIPHTDGNFHPSPLMGGFGMKHPPPQILIKNTPVPADPPTAFNKGKLNSFITQYSTGQVSVEIEWELQKENSKRWNPEIQYTSNYYKSNNVEFAVNTEGVYSEPGPIGTRYLTRNL

SEQ ID NO: 725 - DNA, 2208 bp, synthetic construct
  misc_feature 1..2208: note = Adeno Associated Virus Capsid Protein Variant
  source 1..2208: mol_type = other DNA
atggctgccgatggttatcttccagattggctcgaggacaaccttagtgaaggaattcgcgagtggtgggctttgaaacctggagcccctcaacccaaggcaaatcaacaacatcaagacaacgctcgaggtcttgtgcttccgggttacaaataccttggacccggcaacggactcgacaagggggagccggtcaacgcagcagacgcggcggccctcgagcacgacaaggcctacgaccagcagctcaaggccggagacaacccgtacctcaagtacaaccacgccgacgccgagttccaggagcggctcaaagaagatacgtcttttgggggcaacctcgggcgagcagtcttccaggccaaaaagaggcttcttgaacctcttggtctggttgaggaagcggctaagacggctcctggaaagaagaggcctgtagagcagtctcctcaggaaccggactcctccgcgggtattggcaaatcgggtgcacagcccgctaaaaagagactcaatttcggtcagactggcgacacagagtcagtcccagaccctcaaccaatcggagaacctcccgcagccccctcaggtgtgggatctcttacaatggcttcaggtggtggcgcaccagtggcagacaataacgaaggtgccgatggagtgggtagttcctcgggaaattggcattgcgattcccaatggctgggggacagagtcatcaccaccagcacccgaacctgggccctgcccacctacaacaatcacctctacaagcaaatctccaacagcacatctggaggatcttcaaatgacaacgcctacttcggctacagcaccccctgggggtattttgacttcaacagattccactgccacttctcaccacgtgactggcagcgactcatcaacaacaactggggattccggcctaagcgactcaacttcaagctcttcaacattcaggtcaaagaggttacggacaacaatggagtcaagaccatcgccaataaccttaccagcacggtccaggtcttcacggactcagactatcagctcccgtacgtgctcgggtcggctcacgagggctgcctcccgccgttcccagcggacgttttcatgattcctcagtacgggtatctgacgcttaatgatggaagccaggccgtgggtcgttcgtccttttactgcctggaatatttcccgtcgcaaatgctaagaacgggtaacaacttccagttcaggtacgagtttgagaacgtacctttccatagcagctacgctcacagccaaagcctggaccgactaatgaatccactcatcgaccaatacttgtactatctctcaaagactattaacggttctggaaacggccaatgcacgctaaaattcagtgtggcgggacccagcaacatggctgtccagggaagaaactacatacctggacccagctaccctcaacaacgtgtctcaaccactgtgacttttaacaacaacagcgaatttgcttggcctggagcttcttcttgggctctcaatggacgtaatagcttgatgaatcctggacctgctatggccagccacaaagaaggagaggaccgtttctttcctttgtctggatctttaatttttggcaaacaaggaactggaagagacaacgtggatgcggacaaagtcatgataaccaacgaagaagaaattaaaactactaacccggtagcaacggagtcctatggacaagtggccacaaaccaccagagtgcccgggcacaggcgcagaccggctgggttcaaaaccaaggaatacttccgggtatggtttggcaggacagagatgtgtacctgcaaggacccatttgggccaaaattcctcacacggacggcaactttcacccttctccgctgatgggagggtttggaatgaagcacccgcctcctcagatcctcatcaaaaacacacctgtacctgcggatcctccaacggccttcaacaagggcaagctgaactctttcatcacccagtattctactggccaagtcagcgtggagatcgagtgggagctgcagaaggaaaacagcaagcgctggaacccggagatccagtacacttccaactattacaagtctaataatgttgaatttgctgttaatactgaaggtgtatatagtgaaccccgccccattggcaccagatacctgactcgtaatatg

SEQ ID NO: 726 - protein, 736 aa, synthetic construct
  REGION 1..736: note = Adeno Associated Virus Capsid Protein Variant
MAADGYLPDWLEDNLSEGIREWWALKPGAPQPKANQQHQDNARGLVLPGYKYLGPGNGLDKGEPVNAADAAALEHDKAYDQQLKAGDNPYLKYNHADAEFQERLKEDTSFGGNLGRAVFQAKKRLLEPLGLVEEAAKTAPGKKRPVEQSPQEPDSSAGIGKSGAQPAKKRLNFGQTGDTESVPDPQPIGEPPAAPSGVGSLTMASGGGAPVADNNEGADGVGSSSGNWHCDSQWLGDRVITTSTRTWALPTYNNHLYKQISNSTSGGSSNDNAYFGYSTPWGYFDFNRFHCHFSPRDWQRLINNNWGFRPKRLNFKLFNIQVKEVTDNNGVKTIANNLTSTVQVFTDSDYQLPYVLGSAHEGCLPPFPADVFMIPQYGYLTLNDGSQAVGRSSFYCLEYFPSQMLRTGNNFQFRYEFENVPFHSSYAHSQSLDRLMNPLIDQYLYYLSKTINGSGNGQCTLKFSVAGPSNMAVQGRNYIPGPSYPQQRVSTTVTFNNNSEFAWPGASSWALNGRNSLMNPGPAMASHKEGEDRFFPLSGSLIFGKQGTGRDNVDADKVMITNEEEIKTTNPVATESYGQVATNHQSARAQAQTGWVQNQGILPGMVWQDRDVYLQGPIWAKIPHTDGNFHPSPLMGGFGMKHPPPQILIKNTPVPADPPTAFNKGKLNSFITQYSTGQVSVEIEWELQKENSKRWNPEIQYTSNYYKSNNVEFAVNTEGVYSEPRPIGTRYLTRNM

SEQ ID NO: 727 - DNA, 2208 bp, synthetic construct
  misc_feature 1..2208: note = Adeno Associated Virus Capsid Protein Variant
  source 1..2208: mol_type = other DNA
atggctgccgatggttatcttccagattggctcgaggacaaccttagtgaaggaattcgcgagtggtgggctttgaaacctggagcccctcaacccaaggcaaatcaacaacatcaagacaacgctcgaggtcttgtgcttccgggttacaaataccttggacccggcaacggactcgacaagggggagccggtcaacgcagcagacgcggcggccctcgagcacgacaaggcctacgaccagcagctcaaggccggagacaacccgtacctcaagtacaaccacgccgacgccgagttccaggagcggctcaaagaagatacgtcttttgggggcaacctcgggcgagcagtcttccaggccaaaaagaggcttcttgaacctcttggtctggttgaggaagcggctaagacggctcctggaaagaagaggcctgtagagcagtctcctcaggaaccggactcctccgcgggtattggcaaatcgggtgcacagcccgctaaaaagagactcaatttcggtcagactggcgacacagagtcagtcccagaccctcaaccaatcggagaacctccctcagccccctcaggtgtgggatctcttacaatggcttcaggtggtggcgcaccagtggcagacaataacgaaggtgccgatggagtgggtagttcctcgggaaattggcattgcgattcccaatggctgggggacagagtcatcaccaccagcacccgaacctgggccctgcccacctacaacaatcacctctacaagcaaatctccaacagcacatctggaggatcttcaaatgacaacgcctacttcggctacagcaccccctgggggtattttgacttcaacagattccactgccacttctcaccacgtgactggcagcgactcatcaacaacaactggggattccggcctaagcgactcaacttcaagctcttcaacattcaggtcaaagaggttacggacaacaatggagtcaagaccatcgccaataaccttaccagcacggtccaggtcttcacggactcagactatcagctcccgtacgtgctcgggtcggctcacgagggctgcctcccgccgttcccagcggacgttttcatgattcctcagtacgggtatctgacgcttaatgatggaagccaggccgtgggtcgttcgtccttttactgcctggaatatttcccgtcgcaaatgctaagaacgggtaacaacttccagttcagctacgagtttgagaacgtacctttccatagcagctacgctcacagccaaagcctggaccgactaatgaatccactcatcgaccaatacttgtactatctctcaaagactattaacggttctggacagggccaacaaacgctaaaattcagtgtggccggacccagcaacatggctgtccagggaagaaactacatacctggacccagctaccgacaacaacgtgtctcaaccactgtgacttttaacaacaacagcgaatttgcttggcctggagcttcttcttgggctctcaatggacgtaatagcttgatgaatcctggacctgctatggccagccacaaagaaggagaggaccgtttctttcctttgtctggatctttaatttttggcaaacaaggaactggaagagacaacgtggatgcggacaaagtcatgataaccaacgaagaagaaattaaaactactaacccggtagcaacggagtcctatggacaagtggccacaaaccaccagagtgcccgggcacaggcgcagaccggctgggttcaaaaccaaggaatacttccgggtatggtttggcaggacagagatgtgtacctgcaaggacccatttgggccaaaattcctcacacggacggcaactttcacccttctccgctgatgggagggtttggaatgaagcacccgcctcctcagatcctcatcaaaaacacacctgtacctgcggatcctccaacggccttcaacaagggcaagctgaactctttcatcacccagtattctactggccaagtcagcgtggagatcgagtgggagctgcagaaggaaaacagcaagcgctggaacccggagatccagtacacttccaactattacaagtctaataatgttgaatttgctgttaatactgaaggtgtatatagtgaaccccgccccattggcaccagatacctgactcgtaatctg

SEQ ID NO: 728 - protein, 736 aa, synthetic construct
  REGION 1..736: note = Adeno Associated Virus Capsid Protein Variant
MAADGYLPDWLEDNLSEGIREWWALKPGAPQPKANQQHQDNARGLVLPGYKYLGPGNGLDKGEPVNAADAAALEHDKAYDQQLKAGDNPYLKYNHADAEFQERLKEDTSFGGNLGRAVFQAKKRLLEPLGLVEEAAKTAPGKKRPVEQSPQEPDSSAGIGKSGAQPAKKRLNFGQTGDTESVPDPQPIGEPPSAPSGVGSLTMASGGGAPVADNNEGADGVGSSSGNWHCDSQWLGDRVITTSTRTWALPTYNNHLYKQISNSTSGGSSNDNAYFGYSTPWGYFDFNRFHCHFSPRDWQRLINNNWGFRPKRLNFKLFNIQVKEVTDNNGVKTIANNLTSTVQVFTDSDYQLPYVLGSAHEGCLPPFPADVFMIPQYGYLTLNDGSQAVGRSSFYCLEYFPSQMLRTGNNFQFSYEFENVPFHSSYAHSQSLDRLMNPLIDQYLYYLSKTINGSGQGQQTLKFSVAGPSNMAVQGRNYIPGPSYRQQRVSTTVTFNNNSEFAWPGASSWALNGRNSLMNPGPAMASHKEGEDRFFPLSGSLIFGKQGTGRDNVDADKVMITNEEEIKTTNPVATESYGQVATNHQSARAQAQTGWVQNQGILPGMVWQDRDVYLQGPIWAKIPHTDGNFHPSPLMGGFGMKHPPPQILIKNTPVPADPPTAFNKGKLNSFITQYSTGQVSVEIEWELQKENSKRWNPEIQYTSNYYKSNNVEFAVNTEGVYSEPRPIGTRYLTRNL

SEQ ID NO: 729 - DNA, 2208 bp, synthetic construct
  misc_feature 1..2208: note = Adeno Associated Virus Capsid Protein Variant
  source 1..2208: mol_type = other DNA
atggctgccgatggttatcttccagattggctcgaggacaaccttagtgaaggaattcgcgagtggtgggctttgaaacctggagcccctcaacccaaggcaaatcaacaacatcaagacaacgctcgaggtcttgtgcttccgggttacaaataccttggacccggcaacggactcgacaagggggagccggtcaacgcagcagacgcggcggccctcgagcacgacaaggcctacgaccagcagctcaaggccggagacaacccgtacctcaagtacaaccacgccgacgccgagttccaggagcggctcaaagaagatacgtcttttgggggcaacctcgggcgagcagtcttccaggccaaaaagaggcttcttgaacctcttggtctggttgaggaagcggctaagacggctcctggaaagaagaggcctgtagagcagtctcctcaggaaccggactcctcctggggtattggcaaatcgggtgcagtgcccgctaaaaagagactcaatttcggtcagactggcgacacagagtcagtcccagaccctcaaccaatcggagaacctcccgcagccccctcaggtgtgggatctcttacaatggcttcaggtggtggcgcaccagtggcagacaataacgaaggtgccgatggagtgggtagttcctcgggaaattggcattgcgattcccaatggctgggggacagagtcatcaccaccagcacccgaacctgggccctgcccacctacaacaatcacctctacaagcaaatctccaacagcacatctggaggatcttcaaatgacaacgcctacttcggctacagcaccccctgggggtattttgacttcaacagattccactgccacttctcaccacgtgactggcagcgactcatcaacaacaactggggattccggcctaagcgactcaacttcaagctcttcaacattcaggtcaaagaggttacggacaacaatggagtcaagaccatcgccaataaccttaccagcacggtccaggtcttcacggactcagactatcagctcccgtacgtgctcgggtcggctcacgagggctgcctcccgccgttcccagcggacgttttcatgattcctcagtacgggtatctgacgcttaatgatggaagccaggccgtgggtcgttcgtccttttactgcctggaatatttcccgtcgcaaatgctaagaacgggtaacaacttccagttcagctacgagtttgagaacgtacctttccatagcagctacgctcacagccaaagcctggaccgactaatgaatccactcatcgaccaatacttgtactatctctcaaagactattaacggtcagggacagggccaacaaacgctaaaattcagtgtggccggacccagcaacatggctgtccagggaagaaactacatacctggacccagctaccgacaacaacgtgtctcaaccactgtgacttttaacaacaacagcgaatttgcttggcctggagcttcttcttgggctctcaatggacgtaatagcttgatgaatcctggacctgctatggccagccacaaagaaggagaggaccgtttctttcctttgtctggatctttaatttttggcaaacaaggaactggaagagacaacgtggatgcggacaaagtcatgataaccaacgaagaagaaattaaaactactaacccggtagcaacggagtcctatggacaagtggccacaaaccaccagagtgcccgggcacaggcgcagaccggctgggttcaaaaccaaggaatacttccgggtatggtttggcaggacagagatgtgtacctgcaaggacccatttgggccaaaattcctcacacggacggcaactttcacccttctccgctgatgggagggtttggaatgaagcacccgcctcctcagatcctcatcaaaaacacacctgtacctgcggatcctccaacggccttcaacaagggcaagctgaactctttcatcacccagtattctactggccaagtcagcgtggagatcgagtgggagctgcagaaggaaaacagcaagcgctggaacccggagatccagtacacttccaactattacaagtctaataatgttgaatttgctgttaatactgaaggtgtatatagtgaaccccgccccattggcaccagatacctgactcgtaatctg

SEQ ID NO: 730 - protein, 736 aa, synthetic construct
  REGION 1..736: note = Adeno Associated Virus Capsid Protein Variant
MAADGYLPDWLEDNLSEGIREWWALKPGAPQPKANQQHQDNARGLVLPGYKYLGPGNGLDKGEPVNAADAAALEHDKAYDQQLKAGDNPYLKYNHADAEFQERLKEDTSFGGNLGRAVFQAKKRLLEPLGLVEEAAKTAPGKKRPVEQSPQEPDSSWGIGKSGAVPAKKRLNFGQTGDTESVPDPQPIGEPPAAPSGVGSLTMASGGGAPVADNNEGADGVGSSSGNWHCDSQWLGDRVITTSTRTWALPTYNNHLYKQISNSTSGGSSNDNAYFGYSTPWGYFDFNRFHCHFSPRDWQRLINNNWGFRPKRLNFKLFNIQVKEVTDNNGVKTIANNLTSTVQVFTDSDYQLPYVLGSAHEGCLPPFPADVFMIPQYGYLTLNDGSQAVGRSSFYCLEYFPSQMLRTGNNFQFSYEFENVPFHSSYAHSQSLDRLMNPLIDQYLYYLSKTINGQGQGQQTLKFSVAGPSNMAVQGRNYIPGPSYRQQRVSTTVTFNNNSEFAWPGASSWALNGRNSLMNPGPAMASHKEGEDRFFPLSGSLIFGKQGTGRDNVDADKVMITNEEEIKTTNPVATESYGQVATNHQSARAQAQTGWVQNQGILPGMVWQDRDVYLQGPIWAKIPHTDGNFHPSPLMGGFGMKHPPPQILIKNTPVPADPPTAFNKGKLNSFITQYSTGQVSVEIEWELQKENSKRWNPEIQYTSNYYKSNNVEFAVNTEGVYSEPRPIGTRYLTRNL

SEQ ID NO: 731 - DNA, 2208 bp, synthetic construct
  misc_feature 1..2208: note = Adeno Associated Virus Capsid Protein Variant
  source 1..2208: mol_type = other DNA
atggctgccgatggttatcttccagattggctcgaggacaaccttagtgaaggaattcgcgagtggtgggctttgaaacctggagcccctcaacccaaggcaaatcaacaacatcaagacaacgctcgaggtcttgtgcttccgggttacaaataccttggacccggcaacggactcgacaagggggagccggtcaacgcagcagacgcggcggccctcgagcacgacaaggcctacgaccagcagctcaaggccggagacaacccgtacctcaagtacaaccacgccgacgccgagttccaggagcggctcaaagaagatacgtcttttgggggcaacctcgggcgagcagtcttccaggccaaaaagaggcttcttgaacctcttggtctggttgaggaagcggctaagacggctcctggaaagaagaggcctgtagagcagtctcctcaggaaccggactcctcctggggtattggcaaatcgggtgcagtgcccgctaaaaagagactcaatttcggtcagactggcgacacagagtcagtcccagaccctcaaccaatcggagaacctcccgcagccccctcaggtgtgggatctcttacaatggcttcaggtggtggcgcaccagtggcagacaataacgaaggtgccgatggagtgggtagttcctcgggaaattggcattgcgattcccaatggctgggggacagagtcatcaccaccagcacccgaacctgggccctgcccacctacaacaatcacctctacaagcaaatctccaacagcacatctggaggatcttcaaatgacaacgcctacttcggctacagcaccccctgggggtattttgacttcaacagattccactgccacttctcaccacgtgactggcagcgactcatcaacaacaactggggattccggcctaagcgactcaacttcaagctcttcaacattcaggtcaaagaggttacggacaacaatggagtcaagaccatcgccaataaccttaccagcacggtccaggtcttcacggactcagactatcagctcccgtacgtgctcgggtcggctcacgagggctgcctcccgccgttcccagcggacgttttcatgattcctcagtacgggtatctgacgcttaatgatggaagccaggccgtgggtcgttcgtccttttactgcctggaatatttcccgtcgcaaatgctaagaacgggtaacaacttccagttcagctacgagtttgagaacgtacctttccatagcagctacgctcacagccaaagcctggaccgactaatgaatccactcatcgaccaatacttgtactatctctcaaagactattaacggttctggacagggccaacaaacgctaaaattcagtgtggccggacccagcaacatggctgtccagggaagaaactacatacctggacccagctaccgacaacaacgtgtctcaaccactgtgacttttaacaacaacagcgaatttgcttggcctggagcttcttcttgggctctcaatggacgtaatagcttgatgaatcctggacctgctatggccagccacaaagaaggagaggaccgtttctttcctttgtctggatctttaatttttggcaaacaaggaactggaagagacaacgtggatgcggacaaagtcatgataaccaacgaagaagaaattaaaactactaacccggtagcaacggagtcctatggacaagtggccacaaaccaccagagtgcccgggcacaggcgcagaccggctgggttcaaaaccaaggaatacttccgggtatggtttggcaggacagagatgtgtacctgcaaggacccatttgggccaaaattcctcacacggacggcaactttcacccttctccgctgatgggagggtttggaatgaagcacccgcctcctcagatcctcatcaaaaacacacctgtacctgcggatcctccaacggccttcaacaagggcaagctgcgctctttcatcacccagtattctactggccaagtcagcgtggagatcgagtgggagctgcagaaggaaaacagcaagcgctggaacccggagatccagtacacttccaactattacaagtctaataatgttgaatttgctgttaatactgaaggtgtatatagtgaaccccgccccattggcaccagatacctgactcgtaatctg

SEQ ID NO: 732 - protein, 736 aa, synthetic construct
  REGION 1..736: note = Adeno Associated Virus Capsid Protein Variant
MAADGYLPDWLEDNLSEGIREWWALKPGAPQPKANQQHQDNARGLVLPGYKYLGPGNGLDKGEPVNAADAAALEHDKAYDQQLKAGDNPYLKYNHADAEFQERLKEDTSFGGNLGRAVFQAKKRLLEPLGLVEEAAKTAPGKKRPVEQSPQEPDSSWGIGKSGAVPAKKRLNFGQTGDTESVPDPQPIGEPPAAPSGVGSLTMASGGGAPVADNNEGADGVGSSSGNWHCDSQWLGDRVITTSTRTWALPTYNNHLYKQISNSTSGGSSNDNAYFGYSTPWGYFDFNRFHCHFSPRDWQRLINNNWGFRPKRLNFKLFNIQVKEVTDNNGVKTIANNLTSTVQVFTDSDYQLPYVLGSAHEGCLPPFPADVFMIPQYGYLTLNDGSQAVGRSSFYCLEYFPSQMLRTGNNFQFSYEFENVPFHSSYAHSQSLDRLMNPLIDQYLYYLSKTINGSGQGQQTLKFSVAGPSNMAVQGRNYIPGPSYRQQRVSTTVTFNNNSEFAWPGASSWALNGRNSLMNPGPAMASHKEGEDRFFPLSGSLIFGKQGTGRDNVDADKVMITNEEEIKTTNPVATESYGQVATNHQSARAQAQTGWVQNQGILPGMVWQDRDVYLQGPIWAKIPHTDGNFHPSPLMGGFGMKHPPPQILIKNTPVPADPPTAFNKGKLRSFITQYSTGQVSVEIEWELQKENSKRWNPEIQYTSNYYKSNNVEFAVNTEGVYSEPRPIGTRYLTRNL

SEQ ID NO: 733 - DNA, 2208 bp, synthetic construct
  misc_feature 1..2208: note = Adeno Associated Virus Capsid Protein Variant
  source 1..2208: mol_type = other DNA
atggctgccgatggttatcttccagattggctcgaggacaaccttagtgaaggaattcgcgagtggtgggctttgaaacctggagcccctcaacccaaggcaaatcaacaacatcaagacaacgctcgaggtcttgtgcttccgggttacaaataccttggacccggcaacggactcgacaagggggagccggtcaacgcagcagacgcggcggccctcgagcacgacaaggcctacgaccagcagctcaaggccggagacaacccgtacctcaagtacaaccacgccgacgccgagttccaggagcggctcaaagaagatacgtcttttgggggcaacctcgggcgagcagtcttccaggccaaaaagaggcttcttgaacctcttggtctggttgaggaagcggctaagacggctcctggaaagaagaggcctgtagagcagtctcctcaggaaccggactcctccgcgggtattggcaaatcgggtgcacagcccgctaaaaagagactcaatttcggtcagactggcgacacagagtcagtcccagaccctcaaccaatcggagaacctcccgcagccccctcaggtgtgggatctcttacaatggcttcaggtggtggcgcaccagtggcagacaataacgaaggtgccgatggagtgggtagttcctcgggaaattggcattgcgattcccaatggctgggggacagagtcatcaccaccagcacccgaacctgggccctgcccacctacaacaatcacctctacaagcaaatctccaacagcacatctggaggatcttcaaatgacaacgcctacttcggctacagcaccccctgggggtattttgacttcaacagattccactgccacttctcaccacgtgactggcagcgactcatcaacaacaactggggattccggcctaagcgactcaacttcaagctcttcaacattcaggtcaaagaggttacggacaacaatggagtcaagaccatcgccaataaccttaccagcacggtccaggtcttcacggactcagactatcagctcccgtacgtgctcgggtcggctcacgagggctgcctcccgccgttcccagcggacgttttcatgattcctcagtacgggtatctgacgcttaatgatggaagccaggccgtgggtcgttcgtccttttactgcctggaatatttcccgtcgcaaatgctaagaacgggtaacaacttccagttcagctacgagtttgagaacgtacctttccatagcagctacgctcacagccaaagcctggaccgactaatgaatccactcatcgaccaatacttgtactatctctcaaagactattaacggttctggacagggccaacaaacgctaaaattcagtgtggccggacccagcaacatggctgtccagggaagaaactacatacctggacccagctactctcaacaacgtgtctcaaccactgtgacttttaacaacaacagcgaatttgcttggcctggagcttcttcttgggctctcaatggacgtaatagcttgatgaatcctggacctgctatggccagccacaaagaaggagaggaccgtttctttcctttgtctggatctttaatttttggcaaacaaggaactggaagagacaacgtggatgcggacaaagtcatgataaccaacgaagaagaaattaaaactactaacccggtagcaacggagtcctatggacaagtggccacaaaccaccagagtgcccgggcacaggcgcagaccggctttgttcaaaaccaaggaatacttccgggtatggtttggcaggacagagatgtgtacctgcaaggacccatttgggccaaaattcctcacacggacggcaactttcacccttctccgctgatgggagggtttggaatgaagcacccgcctcctcagatcctcatcaaaaacacacctgtacctgcggatcctccaacggccttcaacaagggcaagctgaactctttcatcacccagtattctactggccaagtcagcgtggagatcgagtgggagctgcagaaggaaaacagcaagcgctggaacccggagatccagtacacttccaactattacaagtctaataatgttgaatttgctgttaatactgaaggtgtatatagtgaaccccgccccattggcaccagatacctgactcgtaatctg

SEQ ID NO: 734 - protein, 736 aa, synthetic construct
  REGION 1..736: note = Adeno Associated Virus Capsid Protein Variant
MAADGYLPDWLEDNLSEGIREWWALKPGAPQPKANQQHQDNARGLVLPGYKYLGPGNGLDKGEPVNAADAAALEHDKAYDQQLKAGDNPYLKYNHADAEFQERLKEDTSFGGNLGRAVFQAKKRLLEPLGLVEEAAKTAPGKKRPVEQSPQEPDSSAGIGKSGAQPAKKRLNFGQTGDTESVPDPQPIGEPPAAPSGVGSLTMASGGGAPVADNNEGADGVGSSSGNWHCDSQWLGDRVITTSTRTWALPTYNNHLYKQISNSTSGGSSNDNAYFGYSTPWGYFDFNRFHCHFSPRDWQRLINNNWGFRPKRLNFKLFNIQVKEVTDNNGVKTIANNLTSTVQVFTDSDYQLPYVLGSAHEGCLPPFPADVFMIPQYGYLTLNDGSQAVGRSSFYCLEYFPSQMLRTGNNFQFSYEFENVPFHSSYAHSQSLDRLMNPLIDQYLYYLSKTINGSGQGQQTLKFSVAGPSNMAVQGRNYIPGPSYSQQRVSTTVTFNNNSEFAWPGASSWALNGRNSLMNPGPAMASHKEGEDRFFPLSGSLIFGKQGTGRDNVDADKVMITNEEEIKTTNPVATESYGQVATNHQSARAQAQTGFVQNQGILPGMVWQDRDVYLQGPIWAKIPHTDGNFHPSPLMGGFGMKHPPPQILIKNTPVPADPPTAFNKGKLNSFITQYSTGQVSVEIEWELQKENSKRWNPEIQYTSNYYKSNNVEFAVNTEGVYSEPRPIGTRYLTRNL

SEQ ID NO: 735 - DNA, 2208 bp, synthetic construct
  misc_feature 1..2208: note = Adeno Associated Virus Capsid Protein Variant
  source 1..2208: mol_type = other DNA
atggctgccgatggttatcttccagattggctcgaggacaaccttagtgaaggaattcgcgagtggtgggctttgaaacctggagcccctcaacccaaggcaaatcaacaacatcaagacaacgctcgaggtcttgtgcttccgggttacaaataccttggacccggcaacggactcgacaagggggagccggtcaacgcagcagacgcggcggccctcgagcacgacaaggcctacgaccagcagctcaaggccggagacaacccgtacctcaagtacaaccacgccgacgccgagttccaggagcggctcaaagaagatacgtcttttgggggcaacctcgggcgagcagtcttccaggccaaaaagaggcttcttgaacctcttggtctggttgaggaagcggctaagacggctcctggaaagaagaggcctgtagagcagtctcctcaggaaccggactcctccgcgggtattggcaaatcgggtgcagtgcccgctaaaaagagactcaatttcggtcagactggcgacacagagtcagtcccagaccctcaaccaatcggagaacctcccgcagccccctcaggtgtgggatctcttacaatggcttcaggtggtggcgcaccagtggcagacaataacgaaggtgccgatggagtgggtagttcctcgggaaattggcattgcgattcccaatggctgggggacagagtcatcaccaccagcacccgaacctgggccctgcccacctacaacaatcacctctacaagcaaatctccaacagcacatctggaggatcttcaaatgacaacgcctacttcggctacagcaccccctgggggtattttgacttcaacagattccactgccacttctcaccacgtgactggcagcgactcatcaacaacaactggggattccggcctaagcgactcaacttcaagctcttcaacattcaggtcaaagaggttacggacaacaatggagtcaagaccatcgccaataaccttaccagcacggtccaggtcttcacggactcagactatcagctcccgtacgtgctcgggtcggctcacgagggctgcctcccgccgttcccagcggacgttttcatgattcctcagtacgggtatctgacgcttaatgatggaagccaggccgtgggtcgttcgtccttttactgcctggaatatttcccgtcgcaaatgctaagaacgggtaacaacttccagttcagctacgagtttgagaacgtacctttccatagcagctacgctcacagccaaagcctggaccgactaatgaatccactcatcgaccaatacttgtactatctctcaaagactattaacggtcagggacagggccaacaaacgctaaaattcagtgtggccggacccagcaacatggctgtccagggaagaaactacatacctggacccagctactctcaacaacgtgtctcaaccactgtgacttttaacaacaacagcgaatttgcttggcctggagcttcttcttgggctctcaatggacgtaatagcttgatgaatcctggacctgctatggccagccacaaagaaggagaggaccgtttctttcctttgtctggatctttaatttttggcaaacaaggaactggaagagacaacgtggatgcggacaaagtcatgataaccaacgaagaagaaattaaaactactaacccggtagcaacggagtcctatggacaagtggccacaaaccaccagagtgcccgggcacaggcgcagaccggctgggttcaaaaccaaggaatacttccgggtatggtttggcaggacagagatgtgtacctgcaaggacccatttgggccaaaattcctcacacggacggcaactttcacccttctccgctgatgggagggtttggaatgaagcacccgcctcctcagatcctcatcaaaaacacacctgtacctgcggatcctccaacggccttcaacaagggcaagctgaactctttcatcacccagtattctactggccaagtcagcgtggagatcgagtgggagctgcagaaggaaaacagcaagcgctggaacccggagatccagtacacttccaactattacaagtctaataatgttgaatttgctgttaatactgaaggtgtatatagtgaaccccgccccattggcaccagatacctgactcgtaatctg

SEQ ID NO: 736 - protein, 736 aa, synthetic construct
  REGION 1..736: note = Adeno Associated Virus Capsid Protein Variant
MAADGYLPDWLEDNLSEGIREWWALKPGAPQPKANQQHQDNARGLVLPGYKYLGPGNGLDKGEPVNAADAAALEHDKAYDQQLKAGDNPYLKYNHADAEFQERLKEDTSFGGNLGRAVFQAKKRLLEPLGLVEEAAKTAPGKKRPVEQSPQEPDSSAGIGKSGAVPAKKRLNFGQTGDTESVPDPQPIGEPPAAPSGVGSLTMASGGGAPVADNNEGADGVGSSSGNWHCDSQWLGDRVITTSTRTWALPTYNNHLYKQISNSTSGGSSNDNAYFGYSTPWGYFDFNRFHCHFSPRDWQRLINNNWGFRPKRLNFKLFNIQVKEVTDNNGVKTIANNLTSTVQVFTDSDYQLPYVLGSAHEGCLPPFPADVFMIPQYGYLTLNDGSQAVGRSSFYCLEYFPSQMLRTGNNFQFSYEFENVPFHSSYAHSQSLDRLMNPLIDQYLYYLSKTINGQGQGQQTLKFSVAGPSNMAVQGRNYIPGPSYSQQRVSTTVTFNNNSEFAWPGASSWALNGRNSLMNPGPAMASHKEGEDRFFPLSGSLIFGKQGTGRDNVDADKVMITNEEEIKTTNPVATESYGQVATNHQSARAQAQTGWVQNQGILPGMVWQDRDVYLQGPIWAKIPHTDGNFHPSPLMGGFGMKHPPPQILIKNTPVPADPPTAFNKGKLNSFITQYSTGQVSVEIEWELQKENSKRWNPEIQYTSNYYKSNNVEFAVNTEGVYSEPRPIGTRYLTRNL

SEQ ID NO: 737 - DNA, 2208 bp, synthetic construct
  misc_feature 1..2208: note = Adeno Associated Virus Capsid Protein Variant
  source 1..2208: mol_type = other DNA
atggctgccgatggttatcttccagattggctcgaggacaaccttagtgaaggaattcgcgagtggtgggctttgaaacctggagcccctcaacccaaggcaaatcaacaacatcaagacaacgctcgaggtcttgtgcttccgggttacaaataccttggacccggcaacggactcgacaagggggagccggtcaacgcagcagacgcggcggccctcgagcacgacaaggcctacgaccagcagctcaaggccggagacaacccgtacctcaagtacaaccacgccgacgccgagttccaggagcggctcaaagaagatacgtcttttgggggcaacctcgggcgagcagtcttccaggccaaaaagaggcttcttgaacctcttggtctggttgaggaagcggctaagacggctcctggaaagaagaggcctgtagagcagtctcctcaggaaccggactcctccgcgggtattggcaaatcgggtgcacagcccgctaaaaagagactcaatttcggtcagactggcgacacagagtcagtcccagaccctcaaccaatcggagaacctcccgcagccccctcaggtgtgggatctcttacaatggcttcaggtggtggcgcaccagtggcagacaataacgaaggtgccgatggagtgggtagttcctcgggaaattggcattgcgattcccaatggctgggggacagagtcatcaccaccagcacccgaacctgggccctgcccacctacaacaatcacctctacaagcaaatctccaacagcacatctggaggatcttcaaatgacaacgcctacttcggctacagcaccccctgggggtattttgacttcaacagattccactgccacttctcaccacgtgactggcagcgactcatcaacaacaactggggattccggcctaagcgactcaacttcaagctcttcaacattcaggtcaaagaggttacggacaacaatggagtcaagaccatcgccaataaccttaccagcacggtccaggtcttctcggactcagactatcagctcccgtacgtgctcgggtcggctcacgagggctgcctcccgccgttcccagcggacgttttcatgattcctcagtacgggtatctgacgcttaatgatggaagccaggccgtgggtcgttcgtccttttactgcctggaatatttcccgtcgcaaatgctaagaacgggtaacaacttccagttcagctacgagtttgagaacgtacctttccatagcagctacgctcacagccaaagcctggaccgactaatgaatccactcatcgaccaatacttgtactatctctcaaagactattaacggttctggacagggccaacaaacgctaaaattcagtgtggccggacccagcaacatggctgtccagggaagaaactacatacctggacccagctaccgacaacaacgtgtctcaaccactgtgacttttaacaacaacagcgaatttgcttggcctggagcttcttcttgggctctcaatggacgtaatagcttgatgaatcctggacctgctatggccagccacaaagaaggagaggaccgtttctttcctttgtctggatctttaatttttggcaaacaaggaactggaagagacaacgtggatgcggacaaagtcatgataaccaacgaagaagaaattaaaactactaacccggtagcaacggagtcctatggacaagtggccacaaaccaccagagtgcccgggcacaggcgcagaccggctgggttcaaaaccaaggaatacttccgggtatggtttggcaggacagagatgtgtacctgcaaggacccatttgggccaaaattcctcacacggacggcaactttcacccttctccgctgatgggagggtttggaatgaagcacccgcctcctcagatcctcatcaaaaacacacctgtacctgcggatcctccaacggccttcaacaagggcaagctgaactctttcatcacccagtattctactggccaagtcagcgtggagatcgagtgggagctgcagaaggaaaacagcaagcgctggaacccggagatccagtacacttccaactattacaagtctaataatgttgaatttgctgttaatactgaaggtgtatatagtgaaccccgccccattggcaccagatacctgactcgtaatctg

SEQ ID NO: 738 - protein, 736 aa, synthetic construct
  REGION 1..736: note = Adeno Associated Virus Capsid Protein Variant
MAADGYLPDWLEDNLSEGIREWWALKPGAPQPKANQQHQDNARGLVLPGYKYLGPGNGLDKGEPVNAADAAALEHDKAYDQQLKAGDNPYLKYNHADAEFQERLKEDTSFGGNLGRAVFQAKKRLLEPLGLVEEAAKTAPGKKRPVEQSPQEPDSSAGIGKSGAQPAKKRLNFGQTGDTESVPDPQPIGEPPAAPSGVGSLTMASGGGAPVADNNEGADGVGSSSGNWHCDSQWLGDRVITTSTRTWALPTYNNHLYKQISNSTSGGSSNDNAYFGYSTPWGYFDFNRFHCHFSPRDWQRLINNNWGFRPKRLNFKLFNIQVKEVTDNNGVKTIANNLTSTVQVFSDSDYQLPYVLGSAHEGCLPPFPADVFMIPQYGYLTLNDGSQAVGRSSFYCLEYFPSQMLRTGNNFQFSYEFENVPFHSSYAHSQSLDRLMNPLIDQYLYYLSKTINGSGQGQQTLKFSVAGPSNMAVQGRNYIPGPSYRQQRVSTTVTFNNNSEFAWPGASSWALNGRNSLMNPGPAMASHKEGEDRFFPLSGSLIFGKQGTGRDNVDADKVMITNEEEIKTTNPVATESYGQVATNHQSARAQAQTGWVQNQGILPGMVWQDRDVYLQGPIWAKIPHTDGNFHPSPLMGGFGMKHPPPQILIKNTPVPADPPTAFNKGKLNSFITQYSTGQVSVEIEWELQKENSKRWNPEIQYTSNYYKSNNVEFAVNTEGVYSEPRPIGTRYLTRNL

SEQ ID NO: 739 - DNA, 2208 bp, synthetic construct
  misc_feature 1..2208: note = Adeno Associated Virus Capsid Protein Variant
  source 1..2208: mol_type = other DNA
atggctgccgatggttatcttccagattggctcgaggacaaccttagtgaaggaattcgcgagtggtgggctttgaaacctggagcccctcaacccaaggcaaatcaacaacatcaagacaacgctcgaggtcttgtgcttccgggttacaaataccttggacccggcaacggactcgacaagggggagccggtcaacgcagcagacgcggcggccctcgagcacgacaaggcctacgaccagcagctcaaggccggagacaacccgtacctcaagtacaaccacgccgacgccgagttccaggagcggctcaaagaagatacgtcttttgggggcaacctcgggcgagcagtcttccaggccaaaaagaggcttcttgaacctcttggtctggttgaggaagcggctaagacggctcctggaaagaagaggcctgtagagcagtctcctcaggaaccggactcctccgcgggtattggcaaatcgggtgcacagcccgctaaaaagagactcaatttcggtcagactggcgacacagagtcagtcccagaccctcaaccaatcggagaacctcccgcagccccctcaggtgtgggatctcttacaatggcttcaggtggtggcgcaccagtggcagacaataacgaaggtgccgatggagtgggtagttcctcgggaaattggcattgcgattcccaatggctgggggacagagtcatcaccaccagcacccgaacctgggccctgcccacctacaacaatcacctctacaagcaaatctccaacagcacatctggaggatcttcaaatgacaacgcctacttcggctacagcaccccctgggggtattttgacttcaacagattccactgccacttctcaccacgtgactggcagcgactcatcaacaacaactggggattccggcctaagcgactcaacttcaagctcttcaacattcaggtcaaagaggttacggacaacaatggagtcaagaccatcgccaataaccttaccagcacggtccaggtcttcacggactcagactatcagctcccgtacgtgctcgggtcggctcacgagggctgcctcccgccgttcccagcggacgttttcatgattcctcagtacgggtatctgacgcttaatgatggaagccaggccgtgggtcgttcgtccttttactgcctggaatatttcccgtcgcaaatgctaagaacgggtaacaacttccagttcagctacgagtttgagaacgtagggttccatagcagctacgctcacagccaaagcctggaccgactaatgaatccactcatcgaccaatacttgtactatctctcaaagactattaacggttctggaaacggccaatgcacgctaaaattcagtgtggccggacccagcaacatggctgtccagggaagaaactacatacctggacccagctaccgacaacaacgtgtctcaaccactgtgacttttaacaacaacagcgaatttgcttggcctggagcttcttcttgggctctcaatggacgtaatagcttgatgaatcctggacctgctatggccagccacaaagaaggagaggaccgtttctttcctttgtctggatctttaatttttggcaaacaaggaactggaagagacaacgtggatgcggacaaagtcatgataaccaacgaagaagaaattaaaactactaacccggtagcaacggagtcctatggacaagtggccacaaaccaccagagtgcccgggcacaggcgcagaccggctgggttcaaaaccaaggaatacttccgggtatggtttggcaggacagagatgtgtacctgcaaggacccatttgggccaaaattcctcacacggacggcaactttcacccttctccgctgatgggagggtttggaatgaagcacccgcctcctcagatcctcatcaaaaacacacctgtacctgcggatcctccaacggccttcaacaagggcaagctgaactctttcatcacccagtattctactggccaagtcagcgtggagatcgagtgggagctgcagaaggaaaacagcaagcgctggaacccggagatccagtacacttccaactattacaagtctaataatgttgaatttgctgttaatactgaaggtgtatatagtgaaccccgccccattggcaccagatacctgactcgtaatctg

SEQ ID NO: 740 - protein, 736 aa, synthetic construct
  REGION 1..736: note = Adeno Associated Virus Capsid Protein Variant
MAADGYLPDWLEDNLSEGIREWWALKPGAPQPKANQQHQDNARGLVLPGYKYLGPGNGLDKGEPVNAADAAALEHDKAYDQQLKAGDNPYLKYNHADAEFQERLKEDTSFGGNLGRAVFQAKKRLLEPLGLVEEAAKTAPGKKRPVEQSPQEPDSSAGIGKSGAQPAKKRLNFGQTGDTESVPDPQPIGEPPAAPSGVGSLTMASGGGAPVADNNEGADGVGSSSGNWHCDSQWLGDRVITTSTRTWALPTYNNHLYKQISNSTSGGSSNDNAYFGYSTPWGYFDFNRFHCHFSPRDWQRLINNNWGFRPKRLNFKLFNIQVKEVTDNNGVKTIANNLTSTVQVFTDSDYQLPYVLGSAHEGCLPPFPADVFMIPQYGYLTLNDGSQAVGRSSFYCLEYFPSQMLRTGNNFQFSYEFENVGFHSSYAHSQSLDRLMNPLIDQYLYYLSKTINGSGNGQCTLKFSVAGPSNMAVQGRNYIPGPSYRQQRVSTTVTFNNNSEFAWPGASSWALNGRNSLMNPGPAMASHKEGEDRFFPLSGSLIFGKQGTGRDNVDADKVMITNEEEIKTTNPVATESYGQVATNHQSARAQAQTGWVQNQGILPGMVWQDRDVYLQGPIWAKIPHTDGNFHPSPLMGGFGMKHPPPQILIKNTPVPADPPTAFNKGKLNSFITQYSTGQVSVEIEWELQKENSKRWNPEIQYTSNYYKSNNVEFAVNTEGVYSEPRPIGTRYLTRNL

SEQ ID NO: 741 - DNA, 2208 bp, synthetic construct
  misc_feature 1..2208: note = Adeno Associated Virus Capsid Protein Variant
  source 1..2208: mol_type = other DNA
atggctgccgatggttatcttccagattggctcgaggacaaccttagtgaaggaattcgcgagtggtgggctttgaaacctggagcccctcaacccaaggcaaatcaacaacatcaagacaacgctcgaggtcttgtgcttccgggttacaaataccttggacccggcaacggactcgacaagggggagccggtcaacgcagcagacgcggcggccctcgagcacgacaaggcctacgaccagcagctcaaggccggagacaacccgtacctcaagtacaaccacgccgacgccgagttccaggagcggctcaaagaagatacgtcttttgggggcaacctcgggcgagcagtcttccaggccaaaaagaggcttcttgaacctcttggtctggttgaggaagcggctaagacggctcctggaaagaagaggcctgtagagcagtctcctcaggaaccggactcctccgcgggtattggcaaatcgggtgcacagcccgctaaaaagagactcaatttcggtcagactggcgacacagagtcagtcccagaccctcaaccaatcggagaacctcccgcagccccctcaggtgtgggatctcttacaatggcttcaggtggtggcgcaccagtggcagacaataacgaaggttccgatggagtgggtagttcctcgggaaattggcattgcgattcccaatggctgggggacagagtcatcaccaccagcacccgaacctgggccctgcccacctacaacaatcacctctacaagcaaatctccaacagcacatctggaggatcttcaaatgacaacgcctacttcggctacagcaccccctgggggtattttgacttcaacagattccactgccacttctcaccacgtgactggcagcgactcatcaacaacaactggggattccggcctaagcgactcaacttcaagctcttcaacattcaggtcaaagaggttacggacaacaatggagtcaagaccatcgccaataaccttaccagcacggtccaggtcttcacggactcagactatcagctcccgtacgtgctcgggtcggctcacgagggctgcctcccgccgttcccagcggacgttttcatgattcctcagtacgggtatctgacgcttaatgatggaagccaggccgtgggtcgttcgtccttttactgcctggaatatttcccgtcgcaaatgctaagaacgggtaacaacttccagttcagctacgagtttgagaacgtacctttccatagcagctacgctcacagccaaagcctggaccgactaatgaatccactcatcgaccaatacttgtactatctctcaaagactattaacggttctggacagggccaacaaacgctaaaattcagtgtggccggacccagcaacatggctgtccagggaagaaactacatacctggacccagctaccgacaacaacgtgtctcaaccactgtgacttttaacaacaacagcgaatttgcttggcctggagcttcttcttgggctctcaatggacgtaatagcttgatgaatcctggacctgctatggccagccacaaagaaggagaggaccgtttctttcctttgtctggatctttaatttttggcaaacaaggaactggaagagacaacgtggatgcggacaaagtcatgataaccaacgaagaagaaattaaaactactaacccggtagcaacggagtcctatggacaagtggccacaaaccaccagagtgcccgggcacaggcgcagaccggctgggttcaaaaccaaggaatacttccgggtatggtttggcaggacagagatgtgtacctgcaaggacccatttgggccaaaattcctcacacggacggcaactttcacccttctccgctgatgggagggtttggaatgaagcacccgcctcctcagatcctcatcaaaaacacacctgtacctgcggatcctccaacggccttcaacaagggcaagctgaactctttcatcacccagtattctactggccaagtcagcgtggagatcgagtgggagctgcagaaggaaaacagcaagcgctggaacccggagatccagtacacttccaactattacaagtctaataatgttgaatttgctgttaatactgaaggtgtatatagtgaaccccgccccattggcaccagatacctgactcgtaatctg

SEQ ID NO: 742 - protein, 736 aa, synthetic construct
  REGION 1..736: note = Adeno Associated Virus Capsid Protein Variant
MAADGYLPDWLEDNLSEGIREWWALKPGAPQPKANQQHQDNARGLVLPGYKYLGPGNGLDKGEPVNAADAAALEHDKAYDQQLKAGDNPYLKYNHADAEFQERLKEDTSFGGNLGRAVFQAKKRLLEPLGLVEEAAKTAPGKKRPVEQSPQEPDSSAGIGKSGAQPAKKRLNFGQTGDTESVPDPQPIGEPPAAPSGVGSLTMASGGGAPVADNNEGSDGVGSSSGNWHCDSQWLGDRVITTSTRTWALPTYNNHLYKQISNSTSGGSSNDNAYFGYSTPWGYFDFNRFHCHFSPRDWQRLINNNWGFRPKRLNFKLFNIQVKEVTDNNGVKTIANNLTSTVQVFTDSDYQLPYVLGSAHEGCLPPFPADVFMIPQYGYLTLNDGSQAVGRSSFYCLEYFPSQMLRTGNNFQFSYEFENVPFHSSYAHSQSLDRLMNPLIDQYLYYLSKTINGSGQGQQTLKFSVAGPSNMAVQGRNYIPGPSYRQQRVSTTVTFNNNSEFAWPGASSWALNGRNSLMNPGPAMASHKEGEDRFFPLSGSLIFGKQGTGRDNVDADKVMITNEEEIKTTNPVATESYGQVATNHQSARAQAQTGWVQNQGILPGMVWQDRDVYLQGPIWAKIPHTDGNFHPSPLMGGFGMKHPPPQILIKNTPVPADPPTAFNKGKLNSFITQYSTGQVSVEIEWELQKENSKRWNPEIQYTSNYYKSNNVEFAVNTEGVYSEPRPIGTRYLTRNL

SEQ ID NO: 743 - DNA, 2208 bp, synthetic construct
  misc_feature 1..2208: note = Adeno Associated Virus Capsid Protein Variant
  source 1..2208: mol_type = other DNA
atggctgccgatggttatcttccagattggctcgaggacaaccttagtgaaggaattcgcgagtggtgggctttgaaacctggagcccctcaacccaaggcaaatcaacaacatcaagacaacgctcgaggtcttgtgcttccgggttacaaataccttggacccggcaacggactcgacaagggggagccggtcaacgcagcagacgcggcggccctcgagcacgacaaggcctacgaccagcagctcaaggccggagacaacccgtacctcaagtacaaccacgccgacgccgagttccaggagcggctcaaagaagatacgtcttttgggggcaacctcgggcgagcagtcttccaggccaaaaagaggcttcttgaacctcttggtctggttgaggaagcggctaagacggctcctggaaagaagaggcctgtagagcagtctcctcaggaaccggactcctccgcgggtattggcaaatcgggtgcacagcccgctaaaaagagactcaatttcggtcagactggcgacacagagtcagtcccagaccctcaaccaatcggagaacctcccgcagccccctcaggtgtgggatctcttacaatggctccaggtggtggcgcaccagtggcagacaataacgaaggtgccgatggagtgggtagttcctcgggaaattggcattgcgattcccaatggctgggggacagagtcatcaccaccagcacccgaacctgggccctgcccacctacaacaatcacctctacaagcaaatctccaacagcacatctggaggatcttcaaatgacaacgcctacttcggctacagcaccccctgggggtattttgacttcaacagattccactgccacttctcaccacgtgactggcagcgactcatcaacaacaactggggattccggcctaagcgactcaacttcaagctcttcaacattcaggtcaaagaggttacggacaacaatggagtcaagaccatcgccaataaccttaccagcacggtccaggtcttcacggactcagactatcagctcccgtacgtgctcgggtcggctcacgagggctgcctcccgccgttcccagcggacgttttcatgattcctcagtacgggtatctgacgcttaatgatggaagccaggccgtgggtcgttcgtccttttactgcctggaatatttcccgtcgcaaatgctaagaacgggtaacaacttccagttcagctacgagtttgagaacgtacctttccatagcagctacgctcacagccaaagcctggaccgactaatgaatccactcatcgaccaatacttgtactatctctcaaagactattaacggttctggacagggccaacaaacgctaaaattcagtgtggccggacccagcaacatggctgtccagggaagaaactacatacctggacccagctaccgacaacaacgtgtctcaaccactgtgacttttaacaacaacagcgaatttgcttggcctggagcttcttcttgggctctcaatggacgtaatagcttgatgaatcctggacctgctatggccagccacaaagaaggagaggaccgtttctttcctttgtctggatctttaatttttggcaaacaaggaactggaagagacaacgtggatgcggacaaagtcatgataaccaacgaagaagaaattaaaactactaacccggtagcaacggagtcctatggacaagtggccacaaaccaccagagtgcccgggcacaggcgcagaccggctgggttcaaaaccaaggaatacttccgggtatggtttggcaggacagagatgtgtacctgcaaggacccatttgggccaaaattcctcacacggacggcaactttcacccttctccgctgatgggagggtttggaatgaagcacccgcctcctcagatcctcatcaaaaacacacctgtacctgcggatcctccaacggccttcaacaagggcaagctgaactctttcatcacccagtattctactggccaagtcagcgtggagatcgagtgggagctgcagaaggaaaacagcaagcgctggaacccggagatccagtacacttccaactattacaagtctaataatgttgaatttgctgttaatactgaaggtgtatatagtgaaccccgccccattggcaccagatacctgactcgtaatctg

SEQ ID NO: 744 - protein, 736 aa, synthetic construct
  REGION 1..736: note = Adeno Associated Virus Capsid Protein Variant
MAADGYLPDWLEDNLSEGIREWWALKPGAPQPKANQQHQDNARGLVLPGYKYLGPGNGLDKGEPVNAADAAALEHDKAYDQQLKAGDNPYLKYNHADAEFQERLKEDTSFGGNLGRAVFQAKKRLLEPLGLVEEAAKTAPGKKRPVEQSPQEPDSSAGIGKSGAQPAKKRLNFGQTGDTESVPDPQPIGEPPAAPSGVGSLTMAPGGGAPVADNNEGADGVGSSSGNWHCDSQWLGDRVITTSTRTWALPTYNNHLYKQISNSTSGGSSNDNAYFGYSTPWGYFDFNRFHCHFSPRDWQRLINNNWGFRPKRLNFKLFNIQVKEVTDNNGVKTIANNLTSTVQVFTDSDYQLPYVLGSAHEGCLPPFPADVFMIPQYGYLTLNDGSQAVGRSSFYCLEYFPSQMLRTGNNFQFSYEFENVPFHSSYAHSQSLDRLMNPLIDQYLYYLSKTINGSGQGQQTLKFSVAGPSNMAVQGRNYIPGPSYRQQRVSTTVTFNNNSEFAWPGASSWALNGRNSLMNPGPAMASHKEGEDRFFPLSGSLIFGKQGTGRDNVDADKVMITNEEEIKTTNPVATESYGQVATNHQSARAQAQTGWVQNQGILPGMVWQDRDVYLQGPIWAKIPHTDGNFHPSPLMGGFGMKHPPPQILIKNTPVPADPPTAFNKGKLNSFITQYSTGQVSVEIEWELQKENSKRWNPEIQYTSNYYKSNNVEFAVNTEGVYSEPRPIGTRYLTRNL

SEQ ID NO: 745 - DNA, 2208 bp, synthetic construct
  misc_feature 1..2208: note = Adeno Associated Virus Capsid Protein Variant
  source 1..2208: mol_type = other DNA
atggctgccgatggttatcttccagattggctcgaggacaaccttagtgaaggaattcgcgagtggtgggctttgaaacctggagcccctcaacccaaggcaaatcaacaacatcaagacaacgctcgaggtcttgtgcttccgggttacaaataccttggacccggcaacggactcgacaagggggagccggtcaacgcagcagacgcggcggccctcgagcacgacaaggcctacgaccagcagctcaaggccggagacaacccgtacctcaagtacaaccacgccgacgccgagttccaggagcggctcaaagaagatacgtcttttgggggcaacctcgggcgagcagtcttccaggccaaaaagaggcttcttgaacctcttggtctggttgaggaagcggctaagacggctcctggaaagaagaggcctgtagagcagtctcctcaggaaccggactcctccgcgggtattggcaaatcgggtgcacagcccgctaaaaagagactcaatttcggtcagactggcgacacagagtcagtcccagaccctcaaccaatcggagaacctcccgcagccccctcaggtgtgggatctcttacaatggcttcaggtggtggcgcaccagtggcagacaataacgaaggtgccgatggagtgggtagttcctcgggaaattggcattgcgattcccaatggctgggggacagagtcatcaccaccagcacccgaacctgggccctgcccacctacaacaatcacctctacaagcaaatctccaacagcacatctggaggatcttcaaatgacaacgcctacttcggctacagcaccccctgggggtattttgacttcaacagattccactgccacttctcaccacgtgactggcagcgactcatcaacaacaactggggattccggcctaagcgactcaacttcaagctcttcaacattcaggtcaaagaggttacggacaacaatggagtcaagaccatcgccaataaccttaccagcacggtccaggtcttcacggacacagactatcagctcccgtacgtgctcgggtcggctcacgagggctgcctcccgccgttcccagcggacgttttcatgattcctcagtacgggtatctgacgcttaatgatggaagccaggccgtgggtcgttcgtccttttactgcctggaatatttcccgtcgcaaatgctaagaacgggtaacaacttccagttcagctacgagtttgagaacgtacctttccatagcagctacgctcacagccaaagcctggaccgactaatgaatccactcatcgaccaatacttgtactatctctcaaagactattaacggttctggacagggccaacaaacgctaaaattcagtgtggccggacccagcaacatggctgtccagggaagaaactacatacctggacccagctaccgacaacaacgtgtctcaaccactgtgacttttaacaacaacagcgaatttgcttggcctggagcttcttcttgggctctcaatggacgtaatagcttgatgaatcctggacctgctatggccagccacaaagaaggagaggaccgtttctttcctttgtctggatctttaatttttggcaaacaaggaactggaagagacaacgtggatgcggacaaagtcatgataaccaacgaagaagaaattaaaactactaacccggtagcaacggagtcctatggacaagtggccacaaaccaccagagtgcccgggcacaggcgcagaccggctgggttcaaaaccaaggaatacttccgggtatggtttggcaggacagagatgtgtacctgcaaggacccatttgggccaaaattcctcacacggacggcaactttcacccttctccgctgatgggagggtttggaatgaagcacccgcctcctcagatcctcatcaaaaacacacctgtacctgcggatcctccaacggccttcaacaagggcaagctgaactctttcatcacccagtattctactggccaagtcagcgtggagatcgagtgggagctgcagaaggaaaacagcaagcgctggaacccggagatccagtacacttccaactattacaagtctaataatgttgaatttgctgttaatactgaaggtgtatatagtgaaccccgccccattggcaccagatacctgactcgtaatctg

SEQ ID NO: 746 - protein, 736 aa, synthetic construct
  REGION 1..736: note = Adeno Associated Virus Capsid Protein Variant
MAADGYLPDWLEDNLSEGIREWWALKPGAPQPKANQQHQDNARGLVLPGYKYLGPGNGLDKGEPVNAADAAALEHDKAYDQQLKAGDNPYLKYNHADAEFQERLKEDTSFGGNLGRAVFQAKKRLLEPLGLVEEAAKTAPGKKRPVEQSPQEPDSSAGIGKSGAQPAKKRLNFGQTGDTESVPDPQPIGEPPAAPSGVGSLTMASGGGAPVADNNEGADGVGSSSGNWHCDSQWLGDRVITTSTRTWALPTYNNHLYKQISNSTSGGSSNDNAYFGYSTPWGYFDFNRFHCHFSPRDWQRLINNNWGFRPKRLNFKLFNIQVKEVTDNNGVKTIANNLTSTVQVFTDTDYQLPYVLGSAHEGCLPPFPADVFMIPQYGYLTLNDGSQAVGRSSFYCLEYFPSQMLRTGNNFQFSYEFENVPFHSSYAHSQSLDRLMNPLIDQYLYYLSKTINGSGQGQQTLKFSVAGPSNMAVQGRNYIPGPSYRQQRVSTTVTFNNNSEFAWPGASSWALNGRNSLMNPGPAMASHKEGEDRFFPLSGSLIFGKQGTGRDNVDADKVMITNEEEIKTTNPVATESYGQVATNHQSARAQAQTGWVQNQGILPGMVWQDRDVYLQGPIWAKIPHTDGNFHPSPLMGGFGMKHPPPQILIKNTPVPADPPTAFNKGKLNSFITQYSTGQVSVEIEWELQKENSKRWNPEIQYTSNYYKSNNVEFAVNTEGVYSEPRPIGTRYLTRNL

SEQ ID NO: 747 - DNA, 2208 bp, synthetic construct
  misc_feature 1..2208: note = Adeno Associated Virus Capsid Protein Variant
  source 1..2208: mol_type = other DNA
atggctgccgatggttatcttccagattggctcgaggacaaccttagtgaaggaattcgcgagtggtgggctttgaaacctggagcccctcaacccaaggcaaatcaacaacatcaagacaacgctcgaggtcttgtgcttccgggttacaaataccttggacccggcaacggactcgacaagggggagccggtcaacgcagcagacgcggcggccctcgagcacgacaaggcctacgaccagcagctcaaggccggagacaacccgtacctcaagtacaaccacgccgacgccgagttccaggagcggctcaaagaagatacgtcttttgggggcaacctcgggcgagcagtcttccaggccaaaaagaggcttcttgaacctcttggtctggttgaggaagcggctaagacggctcctggaaagaagaggcctgtagagcagtctcctcaggaaccggactcctccgcgggtattggcaaatcgggtgcacagcccgctaaaaagagactcaatttcggtcagactggcgacacagagtcagtcccagaccctcaaccaatcggagaacctcccgcagccccctcaggtgtgggatctcttacaatggcttcaggtggtggcgcaccagtggcagacaataacgaaggtgccgatggagtgggtagttcctcgggaaattggcattgcgattcccaatggctgggggacagagtcatcaccaccagcacccgaacctgggccctgcccacctacaacaatcacctctacaagcaaatctccaacagcacatctggaggatcttcaaatgacaacgcctacttcggctacagcaccccctgggggtattttgacttcaacagattccactgccacttctcaccacgtgactggcagcgactcatcaacaacaactggggattccggcctaagcgactcaacttcaagctcttcaacattcaggtcaaagaggttacggacaacaatggagtcaagaccatcgccaataaccttaccagcacggtccaggtcttcacggactcagactatcagctcccgtacgtgctcgggtcggctcacgagggctgcctcccgccgttcccagcggacgttttcatgattcctcagtacgggtatctgacgcttaatgatggaagccaggccgtgggtcgttcgtccttttactgcctggaatatttcccgtcgcaaatgctaagaacgggtaacaacttccagttcagctacgagtttgagaacgtagggttccatagcagctacgctcacagccaaagcctggaccgactaatgaatccactcatcgaccaatacttgtactatctctcaaagactattaacggttctggacagggccaacaaacgctaaaattcagtgtggccggacccagcaacatggctgtccagggaagaaactacatacctggacccagctaccgacaacaacgtgtctcaaccactgtgacttttaacaacaacagcgaatttgcttggcctggagcttcttcttgggctctcaatggacgtaatagcttgatgaatcctggacctgctatggccagccacaaagaaggagaggaccgtttctttcctttgtctggatctttaatttttggcaaacaaggaactggaagagacaacgtggatgcggacaaagtcatgataaccaacgaagaagaaattaaaactactaacccggtagcaacggagtcctatggacaagtggccacaaaccaccagagtgcccgggcacaggcgcagaccggctgggttcaaaaccaaggaatacttccgggtatggtttggcaggacagagatgtgtacctgcaaggacccatttgggccaaaattcctcacacggacggcaactttcacccttctccgctgatgggagggtttggaatgaagcacccgcctcctcagatcctcatcaaaaacacacctgtacctgcggatcctccaacggccttcaacaagggcaagctgaactctttcatcacccagtattctactggccaagtcagcgtggagatcgagtgggagctgcagaaggaaaacagcaagcgctggaacccggagatccagtacacttccaactattacaagtctaataatgttgaatttgctgttaatactgaaggtgtatatagtgaaccccgccccattggcaccagatacctgactcgtaatctg

SEQ ID NO: 748 - protein, 736 aa, synthetic construct
  REGION 1..736: note = Adeno Associated Virus Capsid Protein Variant
MAADGYLPDWLEDNLSEGIREWWALKPGAPQPKANQQHQDNARGLVLPGYKYLGPGNGLDKGEPVNAADAAALEHDKAYDQQLKAGDNPYLKYNHADAEFQERLKEDTSFGGNLGRAVFQAKKRLLEPLGLVEEAAKTAPGKKRPVEQSPQEPDSSAGIGKSGAQPAKKRLNFGQTGDTESVPDPQPIGEPPAAPSGVGSLTMASGGGAPVADNNEGADGVGSSSGNWHCDSQWLGDRVITTSTRTWALPTYNNHLYKQISNSTSGGSSNDNAYFGYSTPWGYFDFNRFHCHFSPRDWQRLINNNWGFRPKRLNFKLFNIQVKEVTDNNGVKTIANNLTSTVQVFTDSDYQLPYVLGSAHEGCLPPFPADVFMIPQYGYLTLNDGSQAVGRSSFYCLEYFPSQMLRTGNNFQFSYEFENVGFHSSYAHSQSLDRLMNPLIDQYLYYLSKTINGSGQGQQTLKFSVAGPSNMAVQGRNYIPGPSYRQQRVSTTVTFNNNSEFAWPGASSWALNGRNSLMNPGPAMASHKEGEDRFFPLSGSLIFGKQGTGRDNVDADKVMITNEEEIKTTNPVATESYGQVATNHQSARAQAQTGWVQNQGILPGMVWQDRDVYLQGPIWAKIPHTDGNFHPSPLMGGFGMKHPPPQILIKNTPVPADPPTAFNKGKLNSFITQYSTGQVSVEIEWELQKENSKRWNPEIQYTSNYYKSNNVEFAVNTEGVYSEPRPIGTRYLTRNL

SEQ ID NO: 749 - DNA, 2208 bp, synthetic construct
  misc_feature 1..2208: note = Adeno Associated Virus Capsid Protein Variant
  source 1..2208: mol_type = other DNA
atggctgccgatggttatcttccagattggctcgaggacaaccttagtgaaggaattcgcgagtggtgggctttgaaacctggagcccctcaacccaaggcaaatcaacaacatcaagacaacgctcgaggtcttgtgcttccgggttacaaataccttggacccggcaacggactcgacaagggggagccggtcaacgcagcagacgcggcggccctcgagcacgacaaggcctacgaccagcagctcaaggccggagacaacccgtacctcaagtacaaccacgccgacgccgagttccaggagcggctcaaagaagatacgtcttttgggggcaacctcgggcgagcagtcttccaggccaaaaagaggcttcttgaacctcttggtctggttgaggaagcggctaagacggctcctggaaagaagaggcctgtagagcagtctcctcaggaaccggactcctccgcgggtattggcaaatcgggtgcacagcccgctaaaaagagactcaatttcggtcagactggcgacacagagtcagtcccagaccctcaaccaatcggagaacctcccgcagccccctcaggtgtgggatctcttacaatggcttcaggtggtggcgcaccagtggcagacaataacgaaggtgccgatggagtgggtagttcctcgggaaattggcattgcgattcccaatggctgggggacagagtcatcaccaccagcacccgaacctgggccctgcccacctacaacaatcacctctacaagcaaatctccaacagcacatctggaggatcttcaaatgacaacgcctacttcggctacagcaccccctgggggtattttgacttcaacagattccactgccacttctcaccacgtgactggcagcgactcatcaacaacaactggggattccggcctaagcgactcaacttcaagctcttcaacattcaggtcaaagaggttacggacaacaatggagtcaagaccatcgccaataaccttaccagcacggtccaggtcttcacggactcagactatcagctcccgtacgtgctcgggtcggctcacgagggctgcctcccgccgttcccagcggacgttttcatgattcctcagtacgggtatctgacgcttaatgatggaagccaggccgtgggtcgttcgtccttttactgcctggaatatttcccgtcgcaaatgctaagaacgggtaacaacttccagttcagctacgagtttgagaacgtacctttccatagcagctacgctcacagccaaagcctggaccgactaatgaatccactcatcgaccaatacttgtactatctctcaaagactattaacggttctggacagggccaacaaacgctaaaattcagtgtggccggacccagcaacatggctgtccagggaagaaactacatacctggacccagctaccgacaacaacgtgtctcaaccactgtgacttttaacaacaacagcgaatttgcttggcctggagcttcttcttgggctctcaatggacgtaatagcttgatgaatcctggacctgctatggccagccacaaagaaggagaggaccgtttctttcctttgtctggatctttaatttttggcaaacaaggaactggaagatttaacgtggatgcggacaaagtcatgataaccaacgaagaagaaattaaaactactaacccggtagcaacggagtcctatggacaagtggccacaaaccaccagagtgcccgggcacaggcgcagaccggctgggttcaaaaccaaggaatacttccgggtatggtttggcaggacagagatgtgtacctgcaaggacccatttgggccaaaattcctcacacggacggcaactttcacccttctccgctgatgggagggtttggaatgaagcacccgcctcctcagatcctcatcaaaaacacacctgtacctgcggatcctccaacggccttcaacaagggcaagctgaactctttcatcacccagtattctactggccaagtcagcgtggagatcgagtgggagctgcagaaggaaaacagcaagcgctggaacccggagatccagtacacttccaactattacaagtctaataatgttgaatttgctgttaatactgaaggtgtatatagtgaaccccgccccattggcaccagatacctgactcgtaatctg

SEQ ID NO: 750 - protein, 736 aa, synthetic construct
  REGION 1..736: note = Adeno Associated Virus Capsid Protein Variant
MAADGYLPDWLEDNLSEGIREWWALKPGAPQPKANQQHQDNARGLVLPGYKYLGPGNGLDKGEPVNAADAAALEHDKAYDQQLKAGDNPYLKYNHADAEFQERLKEDTSFGGNLGRAVFQAKKRLLEPLGLVEEAAKTAPGKKRPVEQSPQEPDSSAGIGKSGAQPAKKRLNFGQTGDTESVPDPQPIGEPPAAPSGVGSLTMASGGGAPVADNNEGADGVGSSSGNWHCDSQWLGDRVITTSTRTWALPTYNNHLYKQISNSTSGGSSNDNAYFGYSTPWGYFDFNRFHCHFSPRDWQRLINNNWGFRPKRLNFKLFNIQVKEVTDNNGVKTIANNLTSTVQVFTDSDYQLPYVLGSAHEGCLPPFPADVFMIPQYGYLTLNDGSQAVGRSSFYCLEYFPSQMLRTGNNFQFSYEFENVPFHSSYAHSQSLDRLMNPLIDQYLYYLSKTINGSGQGQQTLKFSVAGPSNMAVQGRNYIPGPSYRQQRVSTTVTFNNNSEFAWPGASSWALNGRNSLMNPGPAMASHKEGEDRFFPLSGSLIFGKQGTGRFNVDADKVMITNEEEIKTTNPVATESYGQVATNHQSARAQAQTGWVQNQGILPGMVWQDRDVYLQGPIWAKIPHTDGNFHPSPLMGGFGMKHPPPQILIKNTPVPADPPTAFNKGKLNSFITQYSTGQVSVEIEWELQKENSKRWNPEIQYTSNYYKSNNVEFAVNTEGVYSEPRPIGTRYLTRNL

SEQ ID NO: 751 - DNA, 2208 bp, synthetic construct
  misc_feature 1..2208: note = Adeno Associated Virus Capsid Protein Variant
  source 1..2208: mol_type = other DNA
atggctgccgatggttatcttccagattggctcgaggacaaccttagtgaaggaattcgcgagtggtgggctttgaaacctggagcccctcaacccaaggcaaatcaacaacatcaagacaacgctcgaggtcttgtgcttccgggttacaaataccttggacccggcaacggactcgacaagggggagccggtcaacgcagcagacgcggcggccctcgagcacgacaaggcctacgaccagcagctcaaggccggagacaacccgtacctcaagtacaaccacgccgacgccgagttccaggagcggctcaaagaagatacgtcttttgggggcaacctcgggcgagcagtcttccaggccaaaaagaggcttcttgaacctcttggtctggttgaggaagcggctaagacggctcctggaaagaagaggcctgtagagcagtctcctcaggaaccggactcctccgcgggtattggcaaatcgggtgcagtgcccgctaaaaagagactcaatttcggtcagactggcgacacagagtcagtcccagaccctcaaccaatcggagaacctcccgcagccccctcaggtgtgggatctcttacaatggcttcaggtggtggcgcaccagtggcagacaataacgaaggtgccgatggagtgggtagttcctcgggaaattggcattgcgattcccaatggctgggggacagagtcatcaccaccagcacccgaacctgggccctgcccacctacaacaatcacctctacaagcaaatctccaacagcacatctggaggatcttcaaatgacaacgcctacttcggctacagcaccccctgggggtattttgacttcaacagattccactgccacttctcaccacgtgactggcagcgactcatcaacaacaactggggattccggcctaagcgactcaacttcaagctcttcaacattcaggtcaaagaggttacggacaacaatggagtcaagaccatcgccaataaccttaccagcacggtccaggtcttcacggactcagactatcagctcccgtacgtgctcgggtcggctcacgagggctgcctcccgccgttcccagcggacgttttcatgattcctcagtacgggtatctgacgcttaatgatggaagccaggccgtgggtcgttcgtccttttactgcctggaatatttcccgtcgcaaatgctaagaacgggtaacaacttccagttcagctacgagtttgagaacgtacctttccatagcagctacgctcacagccaaagcctggaccgactaatgaatccactcatcgaccaatacttgtactatctctcaaagactattaacggttctggacagggccaacaaacgctaaaattcagtgtggccggacccagcaacatggctgtccagggaagaaactacatacctggacccagctaccgacaacaacgtgtctcaaccactgtgacttttaacaacaacagcgaatttgcttggcctggagcttcttcttgggctctcaatggacgtaatagcttgatgaatcctggacctgctatggccagccacaaagaaggagaggaccgtttctttcctttgtctggatctttaatttttggcaaacaaggaactggaagagacaacgtggatgcggacaaagtcatgataaccaacgaagaagaaattaaaactactaacccggtagcaacggagtcctatggacaagtggccacaaaccaccagagtgcccgggcacaggcgcagaccggctgggttcaaaaccaaggaatacttccgggtatggtttggcaggacagagatgtgtacctgcaaggacccatttgggccaaaattcctcacacggacggcaactttcacccttctccgctgatgggagggtttggaatgaagcacccgcctcctcagatcctcatcaaaaacacacctgtacctgcggatcctccaacggccttcaacaagggcaagctgaactctttcatcacccagtattctactggccaagtcagcgtggagatcgagtgggagctgcagaaggaaaacagcaagcgctggaacccggagatccagtacacttccaactattacaagtctaataatgttgaatttgctgttaatactgaaggtgtatatagtgaaccccgccccattggcaccagatacctgactcgtaatctg

SEQ ID NO: 752 - protein, 736 aa, synthetic construct
  REGION 1..736: note = Adeno Associated Virus Capsid Protein Variant
MAADGYLPDWLEDNLSEGIREWWALKPGAPQPKANQQHQDNARGLVLPGYKYLGPGNGLDKGEPVNAADAAALEHDKAYDQQLKAGDNPYLKYNHADAEFQERLKEDTSFGGNLGRAVFQAKKRLLEPLGLVEEAAKTAPGKKRPVEQSPQEPDSSAGIGKSGAVPAKKRLNFGQTGDTESVPDPQPIGEPPAAPSGVGSLTMASGGGAPVADNNEGADGVGSSSGNWHCDSQWLGDRVITTSTRTWALPTYNNHLYKQISNSTSGGSSNDNAYFGYSTPWGYFDFNRFHCHFSPRDWQRLINNNWGFRPKRLNFKLFNIQVKEVTDNNGVKTIANNLTSTVQVFTDSDYQLPYVLGSAHEGCLPPFPADVFMIPQYGYLTLNDGSQAVGRSSFYCLEYFPSQMLRTGNNFQFSYEFENVPFHSSYAHSQSLDRLMNPLIDQYLYYLSKTINGSGQGQQTLKFSVAGPSNMAVQGRNYIPGPSYRQQRVSTTVTFNNNSEFAWPGASSWALNGRNSLMNPGPAMASHKEGEDRFFPLSGSLIFGKQGTGRDNVDADKVMITNEEEIKTTNPVATESYGQVATNHQSARAQAQTGWVQNQGILPGMVWQDRDVYLQGPIWAKIPHTDGNFHPSPLMGGFGMKHPPPQILIKNTPVPADPPTAFNKGKLNSFITQYSTGQVSVEIEWELQKENSKRWNPEIQYTSNYYKSNNVEFAVNTEGVYSEPRPIGTRYLTRNL

SEQ ID NO: 753 - DNA, 2208 bp, synthetic construct
  misc_feature 1..2208: note = Adeno Associated Virus Capsid Protein Variant
  source 1..2208: mol_type = other DNA
atggctgccgatggttatcttccagattggctcgaggacaaccttagtgaaggaattcgcgagtggtgggctttgaaacctggagcccctcaacccaaggcaaatcaacaacatcaagacaacgctcgaggtcttgtgcttccgggttacaaataccttggacccggcaacggactcgacaagggggagccggtcaacgcagcagacgcggcggccctcgagcacgacaaggcctacgaccagcagctcaaggccggagacaacccgtacctcaagtacaaccacgccgacgccgagttccaggagcggctcaaagaagatacgtcttttgggggcaacctcgggcgagcagtcttccaggccaaaaagaggcttcttgaacctcttggtctggttgaggaagcggctaagacggctcctggaaagaagaggcctgtagagcagtctcctcaggaaccggactcctccgcgggtattggcaaatcgggtgcacagcccgctaaaaagagactcaatttcggtcagactggcgacacagagtcagtcccagaccctcaaccaatcggagaacctcccgcagccccctcaggtgtgggatctcttacaatggcttcaggtggtggcgcaccagtggcagacaataacgaaggtgccgatggagtgggtagttcctcgggaaattggcattgcgattcccaatggctgggggacagagtcatcaccaccagcacccgaacctgggccctgcccacctacaacaatcacctctacaagcaaatctccaacagcacatctggaggatcttcaaatgacaacgcctacttcggctacagcaccccctgggggtattttgacttcaacagattccactgccacttctcaccacgtgactggcagcgactcatcaacaacaactggggattccggcctaagcgactcaacttcaagctcttcaacattcaggtcaaagaggttacggacaacaatggagtcaagaccatcgccaataaccttaccagcacggtccaggtcttcacggactcagactatcagctcccgtacgtgctcgggtcggctcacgagggctgcctcccgccgttcccagcggacgttttcatgattcctcagtacgggtatctgacgcttaatgatggaagccaggccgtgggtcgttcgtccttttactgcctggaatatttcccgtcgcaaatgctaagaacgggtaacaacttccagttcagctacgagtttgagaacgtacctttccatagcagctacgctcacagccaaagcctggaccgactaatgaatccactcatcgaccaatacttgtactatctctcaaagactattaacggttctggacagggccaacaaacgctaaaattcagtgtggccggacccagcaacatggctgtccagggaagaaactacatacctggacccagctaccgacaacaacgtgtctcaaccactgtgacttttaacaacaacagcgaatttgcttggcctggagcttcttcttgggctctcaatggacgtaatagcttgatgaatcctggacctgctatggccagccacaaagaaggagaggaccgtttctttcctttgtctggatctttaatttttggcaaacaaggaactggaagagacaacgtggatgcggacaaagtcatgataaccaacgaagaagaaattaaaactactaacccggtagcaacggagtcctatggacaagtggccacaaaccaccagagtgcccgggcacaggcgcagaccggctgggttcaaaaccaaggaatacttccgggtatggtttggcaggacagagatgtgtacctgcaaggacccatttgggccaaaattcctcacacggacggcaactttcacccttctccgctgatgggagggtttggaatgaagcacccgcctcctcagatcctcatcaaaaacacacctgtacctgcggatcctccaacggccttcaacaagggcaagctgaactctttcatcacccagtattctactggccaagtcagcgtggagatcgagtgggagctgcagaaggaaaacagcaagcgctggaacccggagatccagtacacttccaactattacaagtctaataatgttgaatttgctgttaatactgaaggtgtatatagtgaaccccgccccattggcaccagatacctgactcgtaatatg

SEQ ID NO: 754 - protein, 736 aa, synthetic construct
  REGION 1..736: note = Adeno Associated Virus Capsid Protein Variant
MAADGYLPDWLEDNLSEGIREWWALKPGAPQPKANQQHQDNARGLVLPGYKYLGPGNGLDKGEPVNAADAAALEHDKAYDQQLKAGDNPYLKYNHADAEFQERLKEDTSFGGNLGRAVFQAKKRLLEPLGLVEEAAKTAPGKKRPVEQSPQEPDSSAGIGKSGAQPAKKRLNFGQTGDTESVPDPQPIGEPPAAPSGVGSLTMASGGGAPVADNNEGADGVGSSSGNWHCDSQWLGDRVITTSTRTWALPTYNNHLYKQISNSTSGGSSNDNAYFGYSTPWGYFDFNRFHCHFSPRDWQRLINNNWGFRPKRLNFKLFNIQVKEVTDNNGVKTIANNLTSTVQVFTDSDYQLPYVLGSAHEGCLPPFPADVFMIPQYGYLTLNDGSQAVGRSSFYCLEYFPSQMLRTGNNFQFSYEFENVPFHSSYAHSQSLDRLMNPLIDQYLYYLSKTINGSGQGQQTLKFSVAGPSNMAVQGRNYIPGPSYRQQRVSTTVTFNNNSEFAWPGASSWALNGRNSLMNPGPAMASHKEGEDRFFPLSGSLIFGKQGTGRDNVDADKVMITNEEEIKTTNPVATESYGQVATNHQSARAQAQTGWVQNQGILPGMVWQDRDVYLQGPIWAKIPHTDGNFHPSPLMGGFGMKHPPPQILIKNTPVPADPPTAFNKGKLNSFITQYSTGQVSVEIEWELQKENSKRWNPEIQYTSNYYKSNNVEFAVNTEGVYSEPRPIGTRYLTRNM

SEQ ID NO: 755 - DNA, 2208 bp, synthetic construct
  misc_feature 1..2208: note = Adeno Associated Virus Capsid Protein Variant
  source 1..2208: mol_type = other DNA
atggctgccgatggttatcttccagattggctcgaggacaaccttagtgaaggaattcgcgagtggtgggctttgaaacctggagcccctcaacccaaggcaaatcaacaacatcaagacaacgctcgaggtcttgtgcttccgggttacaaataccttggacccggcaacggactcgacaagggggagccggtcaacgcagcagacgcggcggccctcgagcacgacaaggcctacgaccagcagctcaaggccggagacaacccgtacctcaagtacaaccacgccgacgccgagttccaggagcggctcaaagaagatacgtcttttgggggcaacctcgggcgagcagtcttccaggccaaaaagaggcttcttgaacctcttggtctggttgaggaagcggctaagacggctcctggaaagaagaggcctgtagagcagtctcctcaggaaccggactcctccgcgggtattggcaaatcgggtgcacagcccgctaaaaagagactcaatttcggtcagactggcgacacagagtcagtcccagaccctcaaccaatcggagaacctcccgcagccccctcaggtgtgggatctcttacaatggcttcaggtggtggcgcaccagtggcagacaataacgaaggtgccgatggagtgggtagttcctcgggaaattggcattgcgattcccaatggctgggggacagagtcatcaccaccagcacccgaacctgggccctgcccacctacaacaatcacctctacaagcaaatctccaacagcacatctggaggatcttcaaatgacaacgcctacttcggctacagcaccccctgggggtattttgacttcaacagattccactgccacttctcaccacgtgactggcagcgactcatcaacaacaactggggattccggcctaagcgactcaacttcaagctcttcaacattcaggtcaaagaggttacggacaacaatggagtcaagaccatcgccaataaccttaccagcacggtccaggtcttcacggactcagactatcagctcccgtacgtgctcgggtcggctcacgagggctgcctcccgccgttcccagcggacgttttcatgattcctcagtacgggtatctgacgcttaatgatggaagccaggccgtgggtcgttcgtccttttactgcctggaatatttcccgtcgcaaatgctaagaacgggtaacaacttccagttcagctacgagtttgagaacgtacctttccatagcagctacgctcacagccaaagcctggaccgactaatgaatccactcatcgaccaatacttgtactatctctcaaagactattaacggttctggacagggccaacaaacgctaaaattcagtgtggccggacccagcaacatggctgtccagggaagaaactacatacctggacccagctaccgacaacaacgtgtctcaaccactgtgacttttaacaacaacagcgaatttgcttggcctggagcttcttcttgggctctcaatggacgtaatagcttgatgaatcctggacctgctatggccagccacaaagcgggagaggaccgtttctttcctttgtctggatctttaatttttggcaaacaaggaactggaagagacagtgtggatgcggacaaagtcatgataaccaacgaagaagaaattaaaactactaacccggtagcaacggagtcctatggacaagtggccacaaaccacacgagtgcccgggcacaggcgcagaccggctgggttcaaaaccaaggaatacttccgggtatggtttggcaggacagagatgtgtacctgcaaggacccatttgggccaaaattcctcacacggacggcaactttcacccttctccgctgatgggagggtttggaatgaagcacccgcctcctcagatcctcatcaaaaacacacctgtacctgcggatcctccaacggccttcaacaagggcaagctgaactctttcatcacccagtattctactggccaagtcagcgtggagatcgagtgggagctgcagaaggaaaacagcaagcgctggaacccggagatccagtacacttccaactattacaagtctaataatgttgaatttgctgttaatactgaaggtgtatatagtgaaccccgccccattggcaccagatacctgactcgtaatctg

SEQ ID NO: 756 - protein, 736 aa, synthetic construct
  REGION 1..736: note = Adeno Associated Virus Capsid Protein Variant
MAADGYLPDWLEDNLSEGIREWWALKPGAPQPKANQQHQDNARGLVLPGYKYLGPGNGLDKGEPVNAADAAALEHDKAYDQQLKAGDNPYLKYNHADAEFQERLKEDTSFGGNLGRAVFQAKKRLLEPLGLVEEAAKTAPGKKRPVEQSPQEPDSSAGIGKSGAQPAKKRLNFGQTGDTESVPDPQPIGEPPAAPSGVGSLTMASGGGAPVADNNEGADGVGSSSGNWHCDSQWLGDRVITTSTRTWALPTYNNHLYKQISNSTSGGSSNDNAYFGYSTPWGYFDFNRFHCHFSPRDWQRLINNNWGFRPKRLNFKLFNIQVKEVTDNNGVKTIANNLTSTVQVFTDSDYQLPYVLGSAHEGCLPPFPADVFMIPQYGYLTLNDGSQAVGRSSFYCLEYFPSQMLRTGNNFQFSYEFENVPFHSSYAHSQSLDRLMNPLIDQYLYYLSKTINGSGQGQQTLKFSVAGPSNMAVQGRNYIPGPSYRQQRVSTTVTFNNNSEFAWPGASSWALNGRNSLMNPGPAMASHKAGEDRFFPLSGSLIFGKQGTGRDSVDADKVMITNEEEIKTTNPVATESYGQVATNHTSARAQAQTGWVQNQGILPGMVWQDRDVYLQGPIWAKIPHTDGNFHPSPLMGGFGMKHPPPQILIKNTPVPADPPTAFNKGKLNSFITQYSTGQVSVEIEWELQKENSKRWNPEIQYTSNYYKSNNVEFAVNTEGVYSEPRPIGTRYLTRNL

SEQ ID NO: 757 - DNA, 2208 bp, synthetic construct
  misc_feature 1..2208: note = Adeno Associated Virus Capsid Protein Variant
  source 1..2208: mol_type = other DNA
atggctgccgatggttatcttccagattggctcgaggacaaccttagtgaaggaattcgcgagtggtgggctttgaaacctggagcccctcaacccaaggcaaatcaacaacatcaagacaacgctcgaggtcttgtgcttccgggttacaaataccttggacccggcaacggactcgacaagggggagccggtcaacgcagcagacgcggcggccctcgagcacgacaaggcctacgaccagcagctcaaggccggagacaacccgtacctcaagtacaaccacgccgacgccgagttccaggagcggctcaaagaagatacgtcttttgggggcaacctcgggcgagcagtcttccaggccaaaaagaggcttcttgaacctcttggtctggttgaggaagcggctaagacggctcctggaaagaagaggcctgtagagcagtctcctcaggaaccggactcctccgcgggtattggcaaatcgggtgcacagcccgctaaaaagagactcaatttcggtcagactggcgacacagagtcagtcccagaccctcaaccaatcggagaacctcccgcagccccctcaggtgtgggatctcttacaatggcttcaggtggtggcgcaccagtggcagacaataacgaaggtgccgatggagtgggtagttcctcgggaaattggcattgcgattcccaatggctgggggacagagtcatcaccaccagcacccgaacctgggccctgcccacctacaacaatcacctctacaagcaaatctccaacagcacatctggaggatcttcaaatgacaacgcctacttcggctacagcaccccctgggggtattttgacttcaacagattccactgccacttctcaccacgtgactggcagcgactcatcaacaacaactggggattccggcctaagcgactcaacttcaagctcttcaacattcaggtcaaagaggttacggacaacaatggagtcaagaccatcgccaataaccttaccagcacggtccaggtcttcacggactcagactatcagctcccgtacgtgctcgggtcggctcacgagggctgcctcccgccgttcccagcggacgttttcatgattcctcagtacgggtatctgacgcttaatgatggaagccaggccgtgggtcgttcgtccttttactgcctggaatatttcccgtcgcaaatgctaagaacgggtaacaacttccagttcagctacgagtttgagaacgtacctttccatagcagctacgctcacagccaaagcctggaccgactaatgaatccactcatcgaccaatacttgtactatctctcaaagactattaacggttctggacagggccaacaaacgctaaaattcagtgtggccggacccagcaacatggctgtccagggaagaaactacatacctggacccagctaccgacaacaacgtgtctcaaccactgtgacttttaacaacaacagcgaatttgcttggcctggagcttcttcttgggctctcaatggacgtaatagcttgatgaatcctggacctgctatggccagccacaaagaaggagaggaccgtttcgggcctttgtctggatctttaatttttggcaaacaaggaactggaagagacaacgtggatgcggacaaagtcatgataaccaacgaagaagaaattaaaactactaacccggtagcaacggagtcctatggacaagtggccacaaaccaccagagtgcccgggcacaggcgcagaccggctgggttcaaaaccaaggaatacttccgggtatggtttggcaggacagagatgtgtacctgcaaggacccatttgggccaaaattcctcacacggacggcaactttcacccttctccgctgatgggagggtttggaatgaagcacccgcctcctcagatcctcatcaaaaacacacctgtacctgcggatcctccaacggccttcaacaagggcaagctgaactctttcatcacccagtattctactggccaagtcagcgtggagatcgagtgggagctgcagaaggaaaacagcaagcgctggaacccggagatccagtacacttccaactattacaagtctaataatgttgaatttgctgttaatactgaaggtgtatatagtgaaccccgccccattggcaccagatacctgactcgtaatctg

SEQ ID NO: 758 - protein, 736 aa, synthetic construct
  REGION 1..736: note = Adeno Associated Virus Capsid Protein Variant
MAADGYLPDWLEDNLSEGIREWWALKPGAPQPKANQQHQDNARGLVLPGYKYLGPGNGLDKGEPVNAADAAALEHDKAYDQQLKAGDNPYLKYNHADAEFQERLKEDTSFGGNLGRAVFQAKKRLLEPLGLVEEAAKTAPGKKRPVEQSPQEPDSSAGIGKSGAQPAKKRLNFGQTGDTESVPDPQPIGEPPAAPSGVGSLTMASGGGAPVADNNEGADGVGSSSGNWHCDSQWLGDRVITTSTRTWALPTYNNHLYKQISNSTSGGSSNDNAYFGYSTPWGYFDFNRFHCHFSPRDWQRLINNNWGFRPKRLNFKLFNIQVKEVTDNNGVKTIANNLTSTVQVFTDSDYQLPYVLGSAHEGCLPPFPADVFMIPQYGYLTLNDGSQAVGRSSFYCLEYFPSQMLRTGNNFQFSYEFENVPFHSSYAHSQSLDRLMNPLIDQYLYYLSKTINGSGQGQQTLKFSVAGPSNMAVQGRNYIPGPSYRQQRVSTTVTFNNNSEFAWPGASSWALNGRNSLMNPGPAMASHKEGEDRFGPLSGSLIFGKQGTGRDNVDADKVMITNEEEIKTTNPVATESYGQVATNHQSARAQAQTGWVQNQGILPGMVWQDRDVYLQGPIWAKIPHTDGNFHPSPLMGGFGMKHPPPQILIKNTPVPADPPTAFNKGKLNSFITQYSTGQVSVEIEWELQKENSKRWNPEIQYTSNYYKSNNVEFAVNTEGVYSEPRPIGTRYLTRNL

SEQ ID NO: 759 - DNA, 2208 bp, synthetic construct
  misc_feature 1..2208: note = Adeno Associated Virus Capsid Protein Variant
  source 1..2208: mol_type = other DNA
atggctgccgatggttatcttccagattggctcgaggacaaccttagtgaaggaattcgcgagtggtgggctttgaaacctggagcccctcaacccaaggcaaatcaacaacatcaagacaacgctcgaggtcttgtgcttccgggttacaaataccttggacccggcaacggactcgacaagggggagccggtcaacgcagcagacgcggcggccctcgagcacgacaaggcctacgaccagcagctcaaggccggagacaacccgtacctcaagtacaaccacgccgacgccgagttccaggagcggctcaaagaagatacgtcttttgggggcaacctcgggcgagcagtcttccaggccaaaaagaggcttcttgaacctcttggtctggttgaggaagcggctaagacggctcctggaaagaagaggcctgtagagcagtctcctcaggaaccggactcctccgcgggtattggcaaatcgggtgcacagcccgctaaaaagagactcaatttcggtcagactggcgacacagagtcagtcccagaccctcaaccaatcggagaacctcccgcagccccctcaggtgtgggatctcttacaatggcttcaggtggtggcgcaccagtggcagacaataacgaaggtgccgatggagtgggtagttcctcgggaaattggcattgcgattcccaatggctgggggacagagtcatcaccaccagcacccgaacctgggccctgcccacctacaacaatcacctctacaagcaaatctccaacagcacatctggaggatcttcaaatgacaacgcctacttcggctacagcaccccctgggggtattttgacttcaacagattccactgccacttctcaccacgtgactggcagcgactcatcaacaacaactggggattccggcctaagcgactcaacttcaagctcttcaacattcaggtcaaagaggttacggacaacaatggagtcaagaccatcgccaataaccttaccagcacggtccaggtcttcacggactcagactatcagctcccgtacgtgctcgggtcggctcacgagggctgcctcccgccgttcccagcggacgttttcatgattcctcagtacgggtatctgacgcttaatgatggaagccaggccgtgggtcgttcgtccttttactgcctggaatatttcccgtcgcaaatgctaagaacgggtaacaacttccagttcagctacgagtttgagaacgtacctttccatagcagctacgctcacagccaaagcctggaccgactaatgaatccactcatcgaccaatacttgtactatctctcaaagactattaacggttctggacagggccaacaaacgctaaaattcagtgtggccggacccagcaacatggctgtccagggaagaaactacatacctggacccagctaccgacaacaacgtgtctcaaccactgtgacttttaacaacaacagcgaatttgcttggcctggagcttcttcttgggctctcaatggacgtaatagcttgatgaatcctggacctgctatggccagccacaaagcgggagaggaccgtttctttcctttgtctggatctttaatttttggcaaacaaggaactggaagagacaacgtggatgcggacaaagtcatgataaccaacgaagaagaaattaaaactactaacccggtagcaacggagtcctatggacaagtggccacaaaccacacgagtgcccgggcacaggcgcagaccggctgggttcaaaaccaaggaatacttccgggtatggtttggcaggacagagatgtgtacctgcaaggacccatttgggccaaaattcctcacacggacggcaactttcacccttctccgctgatgggagggtttggaatgaagcacccgcctcctcagatcctcatcaaaaacacacctgtacctgcggatcctccaacggccttcaacaagggcaagctgaactctttcatcacccagtattctactggccaagtcagcgtggagatcgagtgggagctgcagaaggaaaacagcaagcgctggaacccggagatccagtacacttccaactattacaagtctaataatgttgaatttgctgttaatactgaaggtgtatatagtgaaccccgccccattggcaccagatacctgactcgtaatctg

SEQ ID NO: 760 - protein, 736 aa, synthetic construct
  REGION 1..736: note = Adeno Associated Virus Capsid Protein Variant
MAADGYLPDWLEDNLSEGIREWWALKPGAPQPKANQQHQDNARGLVLPGYKYLGPGNGLDKGEPVNAADAAALEHDKAYDQQLKAGDNPYLKYNHADAEFQERLKEDTSFGGNLGRAVFQAKKRLLEPLGLVEEAAKTAPGKKRPVEQSPQEPDSSAGIGKSGAQPAKKRLNFGQTGDTESVPDPQPIGEPPAAPSGVGSLTMASGGGAPVADNNEGADGVGSSSGNWHCDSQWLGDRVITTSTRTWALPTYNNHLYKQISNSTSGGSSNDNAYFGYSTPWGYFDFNRFHCHFSPRDWQRLINNNWGFRPKRLNFKLFNIQVKEVTDNNGVKTIANNLTSTVQVFTDSDYQLPYVLGSAHEGCLPPFPADVFMIPQYGYLTLNDGSQAVGRSSFYCLEYFPSQMLRTGNNFQFSYEFENVPFHSSYAHSQSLDRLMNPLIDQYLYYLSKTINGSGQGQQTLKFSVAGPSNMAVQGRNYIPGPSYRQQRVSTTVTFNNNSEFAWPGASSWALNGRNSLMNPGPAMASHKAGEDRFFPLSGSLIFGKQGTGRDNVDADKVMITNEEEIKTTNPVATESYGQVATNHTSARAQAQTGWVQNQGILPGMVWQDRDVYLQGPIWAKIPHTDGNFHPSPLMGGFGMKHPPPQILIKNTPVPADPPTAFNKGKLNSFITQYSTGQVSVEIEWELQKENSKRWNPEIQYTSNYYKSNNVEFAVNTEGVYSEPRPIGTRYLTRNL

SEQ ID NO: 761 - DNA, 2208 bp, synthetic construct
  misc_feature 1..2208: note = Adeno Associated Virus Capsid Protein Variant
  source 1..2208: mol_type = other DNA
atggctgccgatggttatcttccagattggctcgaggacaaccttagtgaaggaattcgcgagtggtgggctttgaaacctggagcccctcaacccaaggcaaatcaacaacatcaagacaacgctcgaggtcttgtgcttccgggttacaaataccttggacccggcaacggactcgacaagggggagccggtcaacgcagcagacgcggcggccctcgagcacgacaaggcctacgaccagcagctcaaggccggagacaacccgtacctcaagtacaaccacgccgacgccgagttccaggagcggctcaaagaagatacgtcttttgggggcaacctcgggcgagcagtcttccaggccaaaaagaggcttcttgaacctcttggtctggttgaggaagcggctaagacggctcctggaaagaagaggcctgtagagcagtctcctcaggaaccggactcctccgcgggtattggcaaatcgggtgcacagcccgctaaaaagagactcaatttcggtcagactggcgacacagagtcagtcccagaccctcaaccaatcggagaacctcccgcagccccctcaggtgtgggatctcttacaatggcttcaggtggtggcgcaccagtggcagacaataacgaaggtgccgatggagtgggtagttcctcgggaaattggcattgcgattcccaatggctgggggacagagtcatcaccaccagcacccgaacctgggccctgcccacctacaacaatcacctctacaagcaaatctccaacagcacatctggaggatcttcaaatgacaacgcctacttcggctacagcaccccctgggggtattttgacttcaacagattccactgccacttctcaccacgtgactggcagcgactcatcaacaacaactggggattccggcctaagcgactcaacttcaagctcttcaacattcaggtcaaagaggttacggacaacaatggagtcaagaccatcgccaataaccttaccagcacggtccaggtcttcacggactcagactatcagctcccgtacgtgctcgggtcggctcacgagggctgcctcccgccgttcccagcggacgttttcatgattcctcagtacgggtatctgacgcttaatgatggaagccaggccgtgggtcgttcgtccttttactgcctggaatatttcccgtcgcaaatgctaagaacgggtaacaacttccagttcagctacgagtttgagaacgtacctttccatagcagctacgctcacagccaaagcctggaccgactaatgaatccactcatcgaccaatacttgtactatctctcaaagactattaacggttctggacagggccaacaaacgctaaaattcagtgtggccggacccagcaacatggctgtccagggaagaaactacatacctggacccagctaccgacaacaacgtgtctcaaccactgtgacttttaacaacaacagcgaatttgcttggcctggagcttcttcttgggctctcaatggacgtaatagcttgatgaatcctggacctgctatggccagccacaaagaaggagaggaccgtttcgggcctttgtctggatctttaatttttggcaaacaaggaactggaagagacaacgtggatgcggacaaagtcatgataaccaacgaagaagaaattaaaactactaacccggtagcaacggagtcctatggacaagtggccacaaaccaccagagtgcccgggcacaggcgcagaccggctgggttcaaaaccaaggaatacttccgggtatggtttggcaggacagagatgtgtacctgcaaggacccatttgggccaaaattcctcacacggacggcaactttcacccttctccgctgatgggagggtttggaatgaagcacccgcctcctcagatcctcatcaaaaacacacctgtacctgcggatcctcaaacggccttcaacaagggcaagctgaactctttcatcacccagtattctactggccaagtcagcgtggagatcgagtgggagctgcagaaggaaaacagcaagcgctggaacccggagatccagtacacttccaactattacaagtctaataatgttgaatttgctgttaatactgaaggtgtatatagtgaaccccgccccattggcaccagatacctgactcgtaatctg

SEQ ID NO: 762 - protein, 736 aa, synthetic construct
  REGION 1..736: note = Adeno Associated Virus Capsid Protein Variant
MAADGYLPDWLEDNLSEGIREWWALKPGAPQPKANQQHQDNARGLVLPGYKYLGPGNGLDKGEPVNAADAAALEHDKAYDQQLKAGDNPYLKYNHADAEFQERLKEDTSFGGNLGRAVFQAKKRLLEPLGLVEEAAKTAPGKKRPVEQSPQEPDSSAGIGKSGAQPAKKRLNFGQTGDTESVPDPQPIGEPPAAPSGVGSLTMASGGGAPVADNNEGADGVGSSSGNWHCDSQWLGDRVITTSTRTWALPTYNNHLYKQISNSTSGGSSNDNAYFGYSTPWGYFDFNRFHCHFSPRDWQRLINNNWGFRPKRLNFKLFNIQVKEVTDNNGVKTIANNLTSTVQVFTDSDYQLPYVLGSAHEGCLPPFPADVFMIPQYGYLTLNDGSQAVGRSSFYCLEYFPSQMLRTGNNFQFSYEFENVPFHSSYAHSQSLDRLMNPLIDQYLYYLSKTINGSGQGQQTLKFSVAGPSNMAVQGRNYIPGPSYRQQRVSTTVTFNNNSEFAWPGASSWALNGRNSLMNPGPAMASHKEGEDRFGPLSGSLIFGKQGTGRDNVDADKVMITNEEEIKTTNPVATESYGQVATNHQSARAQAQTGWVQNQGILPGMVWQDRDVYLQGPIWAKIPHTDGNFHPSPLMGGFGMKHPPPQILIKNTPVPADPQTAFNKGKLNSFITQYSTGQVSVEIEWELQKENSKRWNPEIQYTSNYYKSNNVEFAVNTEGVYSEPRPIGTRYLTRNL

SEQ ID NO: 763 - DNA, 2208 bp, synthetic construct
  misc_feature 1..2208: note = Adeno Associated Virus Capsid Protein Variant
  source 1..2208: mol_type = other DNA
atggctgccgatggttatcttccagattggctcgaggacaaccttagtgaaggaattcgcgagtggtgggctttgaaacctggagcccctcaacccaaggcaaatcaacaacatcaagacaacgctcgaggtcttgtgcttccgggttacaaataccttggacccggcaacggactcgacaagggggagccggtcaacgcagcagacgcggcggccctcgagcacgacaaggcctacgaccagcagctcaaggccggagacaacccgtacctcaagtacaaccacgccgacgccgagttccaggagcggctcaaagaagatacgtcttttgggggcaacctcgggcgagcagtcttccaggccaaaaagaggcttcttgaacctcttggtctggttgaggaagcggctaagacggctcctggaaagaagaggcctgtagagcagtctcctcaggaaccggactcctccgcgggtattggcaaatcgggtgcacagcccgctaaaaagagactcaatttcggtcagactggcgacacagagtcagtcccagaccctcaaccaatcggagaacctcccgcagccccctcaggtgtgggatctcttacaatggcttcaggtggtggcgcaccagtggcagacaataacgaaggtgccgatggagtgggtagttcctcgggaaattggcattgcgattcccaatggctgggggacagagtcatcaccaccagcacccgaacctgggccctgcccacctacaacaatcacctctacaagcaaatctccaacagcacatctggaggatcttcaaatgacaacgcctacttcggctacagcaccccctgggggtattttgacttcaacagattccactgccacttctcaccacgtgactggcagcgactcatcaacaacaactggggattccggcctaagcgactcaacttcaagctcttcaacattcaggtcaaagaggttacggacaacaatggagtcaagtctatcgccaataaccttaccagcacggtccaggtcttcacggactcagactatcagctcccgtacgtgctcgggtcggctcacgagggctgcctcccgccgttcccagcggacgttttcatgattcctcagtacgggtatctgacgcttaatgatggaagccaggccgtgggtcgttcgtccttttactgcctggaatatttcccgtcgcaaatgctaagaacgggtaacaacttccagttcagctacgagtttgagaacgtacctttccatagcagctacgctcacagccaaagcctggaccgactaatgaatccactcatcgaccaatacttgtactatctctcaaagactattaacggttctggacagggccaacaaacgctaaaattcagtgtggccggacccagcaacatggctgtccagggaagaaactacatacctggacccagctaccgacaacaacgtgtctcaaccactgtgacttttaacaacaacagcgaatttgcttggcctggagcttcttcttgggctctcaatggacgtaatagcttgatgaatcctggacctgctatggccagccacaaagaaggagaggaccgtttctttcctttgtctggatctttaatttttggcaaacaaggaactggaagagacaacgtggatgcggacaaagtcatgataaccaacgaagaagaaattaaaactactaacccggtagcaacggagtcctatggacaagtggccacaaaccaccagagtgcccgggcacaggcgcagaccggctgggttcaaaaccaaggaatacttccgggtatggtttggcaggacagagatgtgtacctgcaaggacccatttgggccaaaattcctcacacggacggcaactttcacccttctccgctgatgggagggtttggaatgaagcacccgcctcctcagatcctcatcaaaaacacacctgtacctgcggatcctccaacggccttcaacaagggcaagctgaactctttcatcacccagtattctactggccaagtcagcgtggagatcgagtgggagctgcagaaggaaaacagcaagcgctggaacccggagatccagtacacttccaactattacaagtctaataatgttgaatttgctgttaatactgaaggtgtatatagtgaaccccgccccattggcaccagatacctgactcgtaatctg

SEQ ID NO: 764 - protein, 736 aa, synthetic construct
  REGION 1..736: note = Adeno Associated Virus Capsid Protein Variant
MAADGYLPDWLEDNLSEGIREWWALKPGAPQPKANQQHQDNARGLVLPGYKYLGPGNGLDKGEPVNAADAAALEHDKAYDQQLKAGDNPYLKYNHADAEFQERLKEDTSFGGNLGRAVFQAKKRLLEPLGLVEEAAKTAPGKKRPVEQSPQEPDSSAGIGKSGAQPAKKRLNFGQTGDTESVPDPQPIGEPPAAPSGVGSLTMASGGGAPVADNNEGADGVGSSSGNWHCDSQWLGDRVITTSTRTWALPTYNNHLYKQISNSTSGGSSNDNAYFGYSTPWGYFDFNRFHCHFSPRDWQRLINNNWGFRPKRLNFKLFNIQVKEVTDNNGVKSIANNLTSTVQVFTDSDYQLPYVLGSAHEGCLPPFPADVFMIPQYGYLTLNDGSQAVGRSSFYCLEYFPSQMLRTGNNFQFSYEFENVPFHSSYAHSQSLDRLMNPLIDQYLYYLSKTINGSGQGQQTLKFSVAGPSNMAVQGRNYIPGPSYRQQRVSTTVTFNNNSEFAWPGASSWALNGRNSLMNPGPAMASHKEGEDRFFPLSGSLIFGKQGTGRDNVDADKVMITNEEEIKTTNPVATESYGQVATNHQSARAQAQTGWVQNQGILPGMVWQDRDVYLQGPIWAKIPHTDGNFHPSPLMGGFGMKHPPPQILIKNTPVPADPPTAFNKGKLNSFITQYSTGQVSVEIEWELQKENSKRWNPEIQYTSNYYKSNNVEFAVNTEGVYSEPRPIGTRYLTRNL

SEQ ID NO: 765 - DNA, 2208 bp, synthetic construct
  misc_feature 1..2208: note = Adeno Associated Virus Capsid Protein Variant
  source 1..2208: mol_type = other DNA
atggctgccgatggttatcttccagattggctcgaggacaaccttagtgaaggaattcgcgagtggtgggctttgaaacctggagcccctcaacccaaggcaaatcaacaacatcaagacaacgctcgaggtcttgtgcttccgggttacaaataccttggacccggcaacggactcgacaagggggagccggtcaacgcagcagacgcggcggccctcgagcacgacaaggcctacgaccagcagctcaaggccggagacaacccgtacctcaagtacaaccacgccgacgccgagttccaggagcggctcaaagaagatacgtcttttgggggcaacctcgggcgagcagtcttccaggccaaaaagaggcttcttgaacctcttggtctggttgaggaagcggctaagacggctcctggaaagaagaggcctgtagagcagtctcctcaggaaccggactcctccgcgggtattggcaaatcgggtgcacagcccgctaaaaagagactcaatttcggtcagactggcgacacagagtcagtcccagaccctcaaccaatcggagaacctcccgcagccccctcaggtgtgggatctcttacaatggcttcaggtggtggcgcaccagtggcagacaataacgaaggtgccgatggagtgggtagttcctcgggaaattggcattgcgattcccaatggctgggggacagagtcatcaccaccagcacccgaacctgggccctgcccacctacaacaatcacctctacaagcaaatctccaacagcacatctggaggatcttcaaatgacaacgcctacttcggctacagcaccccctgggggtattttgacttcaacagattccactgccacttctcaccacgtgactggcagcgactcatcaacaacaactggggattccggcctaagcgactcaacttcaagctcttcaacattcaggtcaaagaggttacggacaacaatggagtcaagaccatcgcgaataaccttaccagcacggtccaggtcttcacggactcagactatcagctcccgtacgtgctcgggtcggctcacgagggctgcctcccgccgttcccagcggacgttttcatgattcctcagtacgggtatctgacgcttaatgatggaagccaggccgtgggtcgttcgtccttttactgcctggaatatttcccgtcgcaaatgctaagaacgggtaacaacttccagttcagctacgagtttgagaacgtacctttccatagcagctacgctcacagccaaagcctggaccgactaatgaatccactcatcgaccaatacttgtactatctctcaaagactattaacggttctggacagggccaacaaacgctaaaattcagtgtggccggacccagcaacatggctgtccagggaagaaactacatacctggacccagctaccgacaacaacgtgtctcaaccactgtgacttttaacaacaacagcgaatttgcttggcctggagcttcttcttgggctctcaatggacgtaatagcttgatgaatcctggacctgctatggccagccacaaagaaggagaggaccgtttctttcctttgtctggatctttaatttttggcaaacaaggaactggaagagacaacgtggatgcggacaaagtcatgataaccaacgaagaagaaattaaaactactaacccggtagcaacggagtcctatggacaagtggccacaaaccaccagagtgcccgggcacaggcgcagaccggctgggttcaaaaccaaggaatacttccgggtatggtttggcaggacagagatgtgtacctgcaaggacccatttgggccaaaattcctcacacggacggcaactttcacccttctccgctgatgggagggtttggaatgaagcacccgcctcctcagatcctcatcaaaaacacacctgtacctgcggatcctccaacggccttcaacaagggcaagctgaactctttcatcacccagtattctactggccaagtcagcgtggagatcgagtgggagctgcagaaggaaaacagcaagcgctggaacccggagatccagtacacttccaactattacaagtctaataatgttgaatttgctgttaatactgaaggtgtatatagtgaaccccgccccattggcaccagatacctgactcgtaatctg

SEQ ID NO: 766 - protein, 736 aa, synthetic construct; identical to SEQ ID NO: 552
  REGION 1..736: note = Adeno Associated Virus Capsid Protein Variant

SEQ ID NO: 767 - DNA, 2208 bp, synthetic construct
  misc_feature 1..2208: note = Adeno Associated Virus Capsid Protein Variant
  source 1..2208: mol_type = other DNA
atggctgccgatggttatcttccagattggctcgaggacaaccttagtgaaggaattcgcgagtggtgggctttgaaacctggagcccctcaacccaaggcaaatcaacaacatcaagacaacgctcgaggtcttgtgcttccgggttacaaataccttggacccggcaacggactcgacaagggggagccggtcaacgcagcagacgcggcggccctcgagcacgacaaggcctacgaccagcagctcaaggccggagacaacccgtacctcaagtacaaccacgccgacgccgagttccaggagcggctcaaagaagatacgtcttttgggggcaacctcgggcgagcagtcttccaggccaaaaagaggcttcttgaacctcttggtctggttgaggaagcggctaagacggctcctggaaagaagaggcctgtagagcagtctcctcaggaaccggactcctccgcgggtattggcaaatcgggtgcacagcccgctaaaaagagactcaatttcggtcagactggcgacacagagtcagtcccagaccctcaaccaatcggagaacctcccgcagccccctcaggtgtgggatctcttacaatggcttcaggtggtggcgcaccagtggcagacaataacgaaggtgccgatggagtgggtagttcctcgggaaattggcattgcgattcccaatggctgggggacagagtcatcaccaccagcacccgaacctgggccctgcccacctacaacaatcacctctacaagcaaatctccaacagcacatctggaggatcttcaaatgacaacgcctacttcggctacagcaccccctgggggtattttgacttcaacagattccactgccacttctcaccacgtgactggcagcgactcatcaacaacaactggggattccggcctaagcgactcaacttcaagctcttcaacattcaggtcaaagaggttacggacaacaatggagtcaagaccatcgccaataaccttaccagcacggtccaggtcttcacggactcagactatcagctcccgtacgtgctcgggtcggctcacgagggctgcctcccgccgttcccagcggacgttttcatgattcctcagtacgggtatctgacgcttaatgatggaagccaggccgtgggtcgttcgtccttttactgcctggaatatttcccgtcgcaaatgctaagaacgggtaacaacttccagttcagctacgagtttgagaacgtacctttccatagcagctacgctcacagccaaagcctggaccgactaatgaatccactcatcgaccaatacttgtactatctctcaaagactattaacggttctggacagggccaacaaacgctaaaattcagtgtggccggacccagcaacatggctgtccagggaagaaactacatacctggacccagctaccgacaacaacgtgtctcaaccactgtgacttttaacaacaacagcgaatttgcttggcctggagcttcttcttgggctctcaatggacgtaatagcttgatgaatcctggacctgctatggccagccacaaagaaggagaggaccgtttctttcctttgtctggatctttaatttttggcaaacaaggaactggaagagacaacgtggatgcggacaaagtcatgataaccaacgaagaagaaattaaaactactaacccggtagcaacggagtcctatggacaagtggccacaaaccaccagagtgcccgggcacaggcgcagacctggtgggttcaaaaccaaggaatacttccgggtatggtttggcaggacagagatgtgtacctgcaaggacccatttgggccaaaattcctcacacggacggcaactttcacccttctccgctgatgggagggtttggaatgaagcacccgcctcctcagatcctcatcaaaaacacacctgtacctgcggatcctccaacggccttcaacaagggcaagctgaactctttcatcacccagtattctactggccaagtcagcgtggagatcgagtgggagctgcagaaggaaaacagcaagcgctggaacccggagatccagtacacttccaactattacaagtctaataatgttgaatttgctgttaatactgaaggtgtatatagtgaaccccgccccattggcaccagatacctgactcgtaatctg

SEQ ID NO: 768 - protein, 736 aa, synthetic construct
  REGION 1..736: note = Adeno Associated Virus Capsid Protein Variant
MAADGYLPDWLEDNLSEGIREWWALKPGAPQPKANQQHQDNARGLVLPGYKYLGPGNGLDKGEPVNAADAAALEHDKAYDQQLKAGDNPYLKYNHADAEFQERLKEDTSFGGNLGRAVFQAKKRLLEPLGLVEEAAKTAPGKKRPVEQSPQEPDSSAGIGKSGAQPAKKRLNFGQTGDTESVPDPQPIGEPPAAPSGVGSLTMASGGGAPVADNNEGADGVGSSSGNWHCDSQWLGDRVITTSTRTWALPTYNNHLYKQISNSTSGGSSNDNAYFGYSTPWGYFDFNRFHCHFSPRDWQRLINNNWGFRPKRLNFKLFNIQVKEVTDNNGVKTIANNLTSTVQVFTDSDYQLPYVLGSAHEGCLPPFPADVFMIPQYGYLTLNDGSQAVGRSSFYCLEYFPSQMLRTGNNFQFSYEFENVPFHSSYAHSQSLDRLMNPLIDQYLYYLSKTINGSGQGQQTLKFSVAGPSNMAVQGRNYIPGPSYRQQRVSTTVTFNNNSEFAWPGASSWALNGRNSLMNPGPAMASHKEGEDRFFPLSGSLIFGKQGTGRDNVDADKVMITNEEEIKTTNPVATESYGQVATNHQSARAQAQTWWVQNQGILPGMVWQDRDVYLQGPIWAKIPHTDGNFHPSPLMGGFGMKHPPPQILIKNTPVPADPPTAFNKGKLNSFITQYSTGQVSVEIEWELQKENSKRWNPEIQYTSNYYKSNNVEFAVNTEGVYSEPRPIGTRYLTRNL

SEQ ID NO: 769 - DNA, 2208 bp, synthetic construct
  misc_feature 1..2208: note = Adeno Associated Virus Capsid Protein Variant
  source 1..2208: mol_type = other DNA
atggctgccgatggttatcttccagattggctcgaggacaaccttagtgaaggaattcgcgagtggtgggctttgaaacctggagcccctcaacccaaggcaaatcaacaacatcaagacaacgctcgaggtcttgtgcttccgggttacaaataccttggacccggcaacggactcgacaagggggagccggtcaacgcagcagacgcggcggccctcgagcacgacaaggcctacgaccagcagctcaaggccggagacaacccgtacctcaagtacaaccacgccgacgccgagttccaggagcggctcaaagaagatacgtcttttgggggcaacctcgggcgagcagtcttccaggccaaaaagaggcttcttgaacctcttggtctggttgaggaagcggctaagacggctcctggaaagaagaggcctgtagagcagtctcctcaggaaccggactcctccgcgggtattggcaaatcgggtgcacagcccgctaaaaagagactcaatttcggtcagactggcgacacagagtcagtcccagaccctcaaccaatcggagaacctcccgcagccccctcaggtgtgggatctcttacaatggcttcaggtggtggcgcaccagtggcagacaataacgaaggtgccgatggagtgggtagttcctcgggaaattggcattgcgattcccaatggctgggggacagagtcatcaccaccagcacccgaacctgggccctgcccacctacaacaatcacctctacaagcaaatctccaacagcacatctggaggatcttcaaatgacaacgcctacttcggctacagcaccccctgggggtattttgacttcaacagattccactgccacttctcaccacgtgactggcagcgactcatcaacaacaactggggattccggcctaagcgactcaacttcaagctcttcaacattcaggtcaaagaggttacggacaacaatggagtcaagaccatcgccaataaccttaccagcacggtccaggtcttcacggactcagactatcagctcccgtacgtgctcgggtcggctcacgagggctgcctcccgccgttcccagcggacgttttcatgattcctcagtacgggtatctgacgcttaatgatggaagccaggccgtgggtcgttcgtccttttactgcctggaatatttcccgtcgcaaatgctaagaacgggtaacaacttccagttcagctacgagtttgagaacgtacctttccatagcagctacgctcacagccaaagcctggaccgactaatgaatccactcatcgaccaatacttgtactatctctcaaagactattaacggttctggacagggccaacaaacgctaaaattcagtgtggccggcgtcagcaacatggctgtccagggaagaaactacatacctggacccagctaccgacaacaacgtgtctcaaccactgtgacttttaacaacaacagcgaatttgcttggcctggagcttcttcttgggctctcaatggacgtaatagcttgatgaatcctggacctgctatggccagccacaaagaaggagaggaccgtttctttcctttgtctggatctttaatttttggcaaacaaggaactggaagagacaacgtggatgcggacaaagtcatgataaccaacgaagaagaaattaaaactactaacccggtagcaacggagtcctatggacaagtggccacaaaccaccagagtgcccgggcacaggcgcagaccggctgggttcaaaaccaaggaatacttccgggtatggtttggcaggacagagatgtgtacctgcaaggacccatttgggccaaaattcctcacacggacggcaactttcacccttctccgctgatgggagggtttggaatgaagcacccgcctcctcagatcctcatcaaaaacacacctgtacctgcggatcctccaacggccttcaacaagggcaagctgaactctttcatcacccagtattctactggccaagtcagcgtggagatcgagtgggagctgcagaaggaaaacagcaagcgctggaacccggagatccagtacacttccaactattacaagtctaataatgttgaatttgctgttaatactgaaggtgtatatagtgaaccccgccccattggcaccagatacctgactcgtaatctg

SEQ ID NO: 770 - protein, 736 aa, synthetic construct
  REGION 1..736: note = Adeno Associated Virus Capsid Protein Variant
MAADGYLPDWLEDNLSEGIREWWALKPGAPQPKANQQHQDNARGLVLPGYKYLGPGNGLDKGEPVNAADAAALEHDKAYDQQLKAGDNPYLKYNHADAEFQERLKEDTSFGGNLGRAVFQAKKRLLEPLGLVEEAAKTAPGKKRPVEQSPQEPDSSAGIGKSGAQPAKKRLNFGQTGDTESVPDPQPIGEPPAAPSGVGSLTMASGGGAPVADNNEGADGVGSSSGNWHCDSQWLGDRVITTSTRTWALPTYNNHLYKQISNSTSGGSSNDNAYFGYSTPWGYFDFNRFHCHFSPRDWQRLINNNWGFRPKRLNFKLFNIQVKEVTDNNGVKTIANNLTSTVQVFTDSDYQLPYVLGSAHEGCLPPFPADVFMIPQYGYLTLNDGSQAVGRSSFYCLEYFPSQMLRTGNNFQFSYEFENVPFHSSYAHSQSLDRLMNPLIDQYLYYLSKTINGSGQGQQTLKFSVAGVSNMAVQGRNYIPGPSYRQQRVSTTVTFNNNSEFAWPGASSWALNGRNSLMNPGPAMASHKEGEDRFFPLSGSLIFGKQGTGRDNVDADKVMITNEEEIKTTNPVATESYGQVATNHQSARAQAQTGWVQNQGILPGMVWQDRDVYLQGPIWAKIPHTDGNFHPSPLMGGFGMKHPPPQILIKNTPVPADPPTAFNKGKLNSFITQYSTGQVSVEIEWELQKENSKRWNPEIQYTSNYYKSNNVEFAVNTEGVYSEPRPIGTRYLTRNL

SEQ ID NO: 771 - DNA, 2208 bp, synthetic construct
  misc_feature 1..2208: note = Adeno Associated Virus Capsid Protein Variant
  source 1..2208: mol_type = other DNA
atggctgccgatggttatcttccagattggctcgaggacaaccttagtgaaggaattcgcgagtggtgggctttgaaacctggagcccctcaacccaaggcaaatcaacaacatcaagacaacgctcgaggtcttgtgcttccgggttacaaataccttggacccggcaacggactcgacaagggggagccggtcaacgcagcagacgcggcggccctcgagcacgacaaggcctacgaccagcagctcaaggccggagacaacccgtacctcaagtacaaccacgccgacgccgagttcgaggagcggctcaaagaagatacgtcttttgggggcaacctcgggcgagcagtcttccaggccaaaaagaggcttcttgaacctcttggtctggttgaggaagcggctaagacggctcctggaaagaagaggcctgtagagcagtctcctcaggaaccggactcctccgcgggtattggcaaatcgggtgcacagcccgctaaaaagagactcaatttcggtcagactggcgacacagagtcagtcccagaccctcaaccaatcggagaacctcccgcagccccctcaggtgtgggatctcttacaatggcttcaggtggtggcgcaccagtggcagacaataacgaaggtgccgatggagtgggtagttcctcgggaaattggcattgcgattcccaatggctgggggacagagtcatcaccaccagcacccgaacctgggccctgcccacctacaacaatcacctctacaagcaaatctccaacagcacatctggaggatcttcaaatgacaacgcctacttcggctacagcaccccctgggggtattttgacttcaacagattccactgccacttctcaccacgtgactggcagcgactcatcaacaacaactggggattccggcctaagcgactcaacttcaagctcttcaacattcaggtcaaagaggttacggacaacaatggagtcaagaccatcgccaataaccttaccagcacggtccaggtcttcacggactcagactatcagctcccgtacgtgctcgggtcggctcacgagggctgcctcccgccgttcccagcggacgttttcatgattcctcagtacgggtatctgacgcttaatgatggaagccaggccgtgggtcgttcgtccttttactgcctggaatatttcccgtcgcaaatgctaagaacgggtaacaacttccagttcagctacgagtttgagaacgtacctttccatagcagctacgctcacagccaaagcctggaccgactaatgaatccactcatcgaccaatacttgtactatctctcaaagactattaacggttctggacagggccaacaaacgctaaaattcagtgtggccggacccagcaacatggctgtccagggaagaaactacatacctggacccagctaccgacaacaacgtgtctcaaccactgtgacttttaacaacaacagcgaatttgcttggcctggagcttcttcttgggctctcaatggacgtaatagcttgatgaatcctggacctgctatggccagccacaaagaaggagaggaccgtttctttcctttgtctggatctttaatttttggcaaacaaggaactggaagagacaacgtggatgcggacaaagtcatgataaccaacgaagaagaaattaaaactactaacccggtagcaacggagtcctatggacaagtggccacaaaccaccagagtgcccgggcacaggcgcagaccggctgggttcaaaaccaaggaatacttccgggtatggtttggcaggacagagatgtgtacctgcaaggacccatttgggccaaaattcctcacacggacggcaactttcacccttctccgctgatgggagggtttggaatgaagcacccgcctcctcagatcctcatcaaaaacacacctgtacctgcggatcctccaacggccttcaacaagggcaagctgaactctttcatcacccagtattctactggccaagtcagcgtggagatcgagtgggagctgcagaaggaaaacagcaagcgctggaacccggagatccagtacacttccaactattacaagtctaataatgttgaatttgctgttaatactgaaggtgtatatagtgaaccccgccccattggcaccagatacctgactcgtaatctg

SEQ ID NO: 772 - protein, 736 aa, synthetic construct
  REGION 1..736: note = Adeno Associated Virus Capsid Protein Variant
MAADGYLPDWLEDNLSEGIREWWALKPGAPQPKANQQHQDNARGLVLPGYKYLGPGNGLDKGEPVNAADAAALEHDKAYDQQLKAGDNPYLKYNHADAEFEERLKEDTSFGGNLGRAVFQAKKRLLEPLGLVEEAAKTAPGKKRPVEQSPQEPDSSAGIGKSGAQPAKKRLNFGQTGDTESVPDPQPIGEPPAAPSGVGSLTMASGGGAPVADNNEGADGVGSSSGNWHCDSQWLGDRVITTSTRTWALPTYNNHLYKQISNSTSGGSSNDNAYFGYSTPWGYFDFNRFHCHFSPRDWQRLINNNWGFRPKRLNFKLFNIQVKEVTDNNGVKTIANNLTSTVQVFTDSDYQLPYVLGSAHEGCLPPFPADVFMIPQYGYLTLNDGSQAVGRSSFYCLEYFPSQMLRTGNNFQFSYEFENVPFHSSYAHSQSLDRLMNPLIDQYLYYLSKTINGSGQGQQTLKFSVAGPSNMAVQGRNYIPGPSYRQQRVSTTVTFNNNSEFAWPGASSWALNGRNSLMNPGPAMASHKEGEDRFFPLSGSLIFGKQGTGRDNVDADKVMITNEEEIKTTNPVATESYGQVATNHQSARAQAQTGWVQNQGILPGMVWQDRDVYLQGPIWAKIPHTDGNFHPSPLMGGFGMKHPPPQILIKNTPVPADPPTAFNKGKLNSFITQYSTGQVSVEIEWELQKENSKRWNPEIQYTSNYYKSNNVEFAVNTEGVYSEPRPIGTRYLTRNL

SEQ ID NO: 773 - DNA, 2208 bp, synthetic construct
  misc_feature 1..2208: note = Adeno Associated Virus Capsid Protein Variant
  source 1..2208: mol_type = other DNA
atggctgccgatggttatcttccagattggctcgaggacaaccttagtgaaggaattcgcgagtggtgggctttgaaacctggagcccctcaacccaaggcaaatcaacaacatcaagacaacgctcgaggtcttgtgcttccgggttacaaataccttggacccggcaacggactcgacaagggggagccggtcaacgcagcagacgcggcggccctcgagcacgacaaggcctacgaccagcagctcaaggccggagacaacccgtacctcaagtacaaccacgccgacgccgagttccaggagcggctcaaagaagatacgtcttttgggggcaacctcgggcgagcagtcttccaggccaaaaagaggcttcttgaacctcttggtctggttgaggaagcggctaagacggctcctggaaagaagaggcctgtagagcagtctcctcaggaaccggactcctccgcgggtattggcaaatcgggtgcacagcccgctaaaaagagactcaatttcggtcagactggcgacacagagtcagtcccagaccctcaaccaatcggagaacctcccgcagccccctcaggtgtgggatctcttacaatggcttcaggtggtggcgcaccagtggcagacaataacgaaggtgccgatggagtgggtagttcctcgggaaattggcattgcgattcccaatggctgggggacagagtcatcaccaccagcacccgaacctgggccctgcccacctacaacaatcacctctacaagcaaatctccaacagcacatctggaggatcttcaaatgacaacgcctacttcggctacagcaccccctgggggtattttgacttcaacagattccactgccacttctcaccacgtgactggcagcgactcatcaacaacaactggggattccggcctaagcgactcaacttcaagctcttcaacattcaggtcaaagaggttacggacaacaatggagtcaagactatcgccaataaccttaccagcacggtccaggtcttcacggactcagactatcagctcccgtacgtgctcgggtcggctcacgagggctgcctcccgccgttcccagcggacgttttcatgattcctcagtacgggtatctgacgcttaatgatggaagccaggccgtgggtcgttcgtccttttactgcctggaatatttcccgtcgcaaatgctaagaacgggtaacaacttccagttcagctacgagtttgagaacgtacctttccatagcagctacgctcacagccaaagcctggaccgactaatgaatccactcatcgaccaatacttgtactatctctcaaagactattaacggttctggacagggccaacaaacgctaaaattcagtgtggccggacccagcaacatggctgtccagggaagaaactacatacctggacccagctaccgacaacaacgtgtctcaaccactgtgacttttaacaacaacagcgaatttgcttggcctggagcttcttcttgggctctcaatggacgcaatagcttgatgaatcctggacctgctatggccagccacaaagaaggagaggaccgtttctttcctttgtctggatctttaatttttggcaaacaaggaactggaagagacaacgtggatgcggacaaagtcatgataaccaacgaagaagaaattaaaactactaacccggtagcaacggagtcctatggacaagtggccacaaaccaccagagtgcccgggcacaggcgcagaccggctgggttcaaaaccaaggaatacttccgggtatggtttggcaggacagagatgtgtacctgcaaggacccatttgggccaaaattcctcacacggacggcaactttcacccttctccgctgatgggagggtttggaatgaagcacccgcctcctcagatcctcatcaaaaacacacctgtacctgcggatcctccaacggccttcaacaagggcaagctgaactctttcatcacccagtattctactggccaagtcagcgtggagatcgagtgggagctgcagaaggaaaacagcaagcgctggaacccggagatccagtacacttccaactattacaagtctaataatgttgaatttgctgttaatactgaaggtgtatatagtgaaccccgccccattggcaccagatacctgactcgtaatctg

SEQ ID NO: 774 - protein, 736 aa, synthetic construct; identical to SEQ ID NO: 552
  REGION 1..736: note = Adeno Associated Virus Capsid Protein Variant

SEQ ID NO: 775 - DNA, 2208 bp, synthetic construct
  misc_feature 1..2208: note = Adeno Associated Virus Capsid Protein Variant
  source 1..2208: mol_type = other DNA
atggctgccgatggttatcttccagattggctcgaggacaaccttagtgaaggaattcgcgagtggtgggctttgaaacctggagcccctcaacccaaggcaaatcaacaacatcaagacaacgctcgaggtcttgtgcttccgggttacaaataccttggacccggcaacggactcgacaagggggagccggtcaacgcagcagacgcggcggccctcgagcacgacaaggcctacgaccagcagctcaaggccggagacaacccgtacctcaagtacaaccacgccgacgccgagttccaggagcggctcaaagaagatacgtcttttgggggcaacctcgggcgagcagtcttccaggccaaaaagaggcttcttgaacctcttggtctggttgaggaagcggctaagacggctcctggaaagaagaggcctgtagagcagtctcctcaggaaccggactcctccgcgggtattggcaaatcgggtgcacagcccgctaaaaagagactcaatttcggtcagactggcgacacagagtcagtcccagaccctcaaccaatcggagaacctcccgcagccccctcaggtgtgggatctcttacaatggcttcaggtggtggcgcaccagtggcagacaataacgaaggtgccgatggagtgggtagttcctcgggaaattggcattgcgattcccaatggctgggggacagagtcatcaccaccagcacccgaacctgggccctgcccacctacaacaatcacctctacaagcaaatctccaacagcacatctggaggatcttcaaatgacaacgcctacttcggctacagcaccccctgggggtattttgacttcaacagattccactgccacttctcaccacgtgactggcagcgactcatcaacaacaactggggattccggcctaagcgactcaacttcaagctcttcaacattcaggtcaaagaggttacggacaacaatggagtcaagaccatcgccaataaccttaccagcacggtccaggtcttcacggactcagactatcagctcccgtacgtgctcgggtcggctcacgagggctgcctcccgccgttcccagcggacgttttcatgattcctcagtacgggtatctgacgcttaatgatggaagccaggccgtgggtcgttcgtccttttactgcctggaatatttcccgtcgcaaatgctaagaacgggtaacaacttccagttcagctacgagtttgagaacgtacctttccatagcagctacgctcacagccaaagcctggaccgactaatgaatccactcatcgaccaatacttgtactatctctcaaagactattaacggttctggacagggccaacaaacgctaaaattcagtgtggccggacccagcaacatggctgtccagggaagaaactacatacctggacccagctaccgacaacaacgtgtctcaaccactgtgacttttaacaacaacagcgaatttgcttggcctggagcttcttcttgggctctcaatggacgtaatagcttgatgaatcctggacctgctatggccagccacaaagaaggagaggaccgtttctttcctttgtctggatctttaatttttggcaaacaaggaactggaagagacaacgtggatgcggacaaagtcatgataaccaacgaagaagaaattaaaactactaacccggtagcaacggagtcctatggacaagtggccacaaaccaccagagtgcccgggcacaggcgcagaccggctgggttcaaaaccaaggaatacttccgggtatggtttggcaggacagagatgtgtacctgcaaggacccatttgggccaaaattcctcacacggacggcaactttcacccttctccgctgatgggagggtttggaatgaagcacccgcctcctcagatcctcatcaaaaacacacctgtacctgcggatcctccaacggccttcaacaagggcaagctgaactctttcatcacccagtattctactggccaagtcagcgtggagatcgagtgggagctgcagaaggaaaacagcaagcgctggaacccggagatccagtacacttccaactattacaagtctaataatgttgaatttgctgttaatactgaaggtgtatatagtgaaccccgccacattggcaccagatacctgactcgtaatctg

SEQ ID NO: 776 - protein, 736 aa, synthetic construct
  REGION 1..736: note = Adeno Associated Virus Capsid Protein Variant
MAADGYLPDWLEDNLSEGIREWWALKPGAPQPKANQQHQDNARGLVLPGYKYLGPGNGLDKGEPVNAADAAALEHDKAYDQQLKAGDNPYLKYNHADAEFQERLKEDTSFGGNLGRAVFQAKKRLLEPLGLVEEAAKTAPGKKRPVEQSPQEPDSSAGIGKSGAQPAKKRLNFGQTGDTESVPDPQPIGEPPAAPSGVGSLTMASGGGAPVADNNEGADGVGSSSGNWHCDSQWLGDRVITTSTRTWALPTYNNHLYKQISNSTSGGSSNDNAYFGYSTPWGYFDFNRFHCHFSPRDWQRLINNNWGFRPKRLNFKLFNIQVKEVTDNNGVKTIANNLTSTVQVFTDSDYQLPYVLGSAHEGCLPPFPADVFMIPQYGYLTLNDGSQAVGRSSFYCLEYFPSQMLRTGNNFQFSYEFENVPFHSSYAHSQSLDRLMNPLIDQYLYYLSKTINGSGQGQQTLKFSVAGPSNMAVQGRNYIPGPSYRQQRVSTTVTFNNNSEFAWPGASSWALNGRNSLMNPGPAMASHKEGEDRFFPLSGSLIFGKQGTGRDNVDADKVMITNEEEIKTTNPVATESYGQVATNHQSARAQAQTGWVQNQGILPGMVWQDRDVYLQGPIWAKIPHTDGNFHPSPLMGGFGMKHPPPQILIKNTPVPADPPTAFNKGKLNSFITQYSTGQVSVEIEWELQKENSKRWNPEIQYTSNYYKSNNVEFAVNTEGVYSEPRHIGTRYLTRNL

SEQ ID NO: 777 - DNA, 2208 bp, synthetic construct
  misc_feature 1..2208: note = Adeno Associated Virus Capsid Protein Variant
  source 1..2208: mol_type = other DNA
atggctgccgatggttatcttccagattggctcgaggacaaccttagtgaaggaattcgcgagtggtgggctttgaaacctggagcccctcaacccaaggcaaatcaacaacatcaagacaacgctcgaggtcttgtgcttccgggttacaaataccttggacccggcaacggactcgacaagggggagccggtcaacgcagcagacgcggcggccctcgagcacgacaaggcctacgaccagcagctcaaggccggagacaacccgtacctcaagtacaaccacgccgacgccgagttccaggagcggctcaaagaagatacgtcttttgggggcaacctcgggcgagcagtcttccaggccaaaaagaggcttcttgaacctcttggtctggttgaggaagcggctaagacggctcctggaaagaagaggcctgtagagcagtctcctcaggaaccggactcctccgcgggtattggcaaatcgggtgcacagcccgctaaaaagagactcaatttcggtcagactggcgacacagagtcagtcccagaccctcaaccaatcggagcgcctcccgcagccccctcaggtgtgggatctcttacaatggcttcaggtggtggcgcaccagtggcagacaataacgaaggtgccgatggagtgggtagttcctcgggaaattggcattgcgattcccaatggctgggggacagagtcatcaccaccagcacccgaacctgggccctgcccacctacaacaatcacctctacaagcaaatctccaacagcacatctggaggatcttcaaatgacaacgcctacttcggctacagcaccccctgggggtattttgacttcaacagattccactgccacttctcaccacgtgactggcagcgactcatcaacaacaactggggattccggcctaagcgactcaacttcaagctcttcaacattcaggtcaaagaggttacggacaacaatggagtcaagaccatcgccaataaccttaccagcacggtccaggtcttcacggactcagactatcagctcccgtacgtgctcgggtcggctcacgagggctgcctcccgccgttcccagcggacgttttcatgattcctcagtacgggtatctgacgcttaatgatggaagccaggccgtgggtcgttcgtccttttactgcctggaatatttcccgtcgcaaatgctaagaacgggtaacaacttccagttcagctacgagtttgagaacgtacctttccatagcagctacgctcacagccaaagcctggaccgactaatgaatccactcatcgaccaatacttgtactatctctcaaagactattaacggttctggacagggccaacaaacgctaaaattcagtgtggccggacccagcaacatggctgtccagggaagaaactacatacctggacccagctaccgacaacaacgtgtctcaaccactgtgacttttaacaacaacagcgaatttgcttggcctggagcttcttcttgggctctcaatggacgtaatagcttgatgaatcctggacctgctatggccagccacaaagaaggagaggaccgtttctttcctttgtctggatctttaatttttggcaaacaaggaactggaagagacaacgtggatgcggacaaagtcatgataaccaacgaagaagaaattaaaactactaacccggtagcaacggagtcctatggacaagtggccacaaaccaccagagtgcccgggcacaggcgcagaccggctgggttcaaaaccaaggaatacttccgggtatggtttggcaggacagagatgtgtacctgcaaggacccatttgggccaaaattcctcacacggacggcaactttcacccttctccgctgatgggagggtttggaatgaagcacccgcctcctcagatcctcatcaaaaacacacctgtacctgcggatcctccaacggccttcaacaagggcaagctgaactctttcatcacccagtattctactggccaagtcagcgtggagatcgagtgggagctgcagaaggaaaacagcaagcgctggaacccggagatccagtacacttccaactattacaagtctaataatgttgaatttgctgttaatactgaaggtgtatatagtgaaccccgccccattggcaccagatacctgactcgtaatctg

SEQ ID NO: 778 - protein, 736 aa, synthetic construct
  REGION 1..736: note = Adeno Associated Virus Capsid Protein Variant
MAADGYLPDWLEDNLSEGIREWWALKPGAPQPKANQQHQDNARGLVLPGYKYLGPGNGLDKGEPVNAADAAALEHDKAYDQQLKAGDNPYLKYNHADAEFQERLKEDTSFGGNLGRAVFQAKKRLLEPLGLVEEAAKTAPGKKRPVEQSPQEPDSSAGIGKSGAQPAKKRLNFGQTGDTESVPDPQPIGAPPAAPSGVGSLTMASGGGAPVADNNEGADGVGSSSGNWHCDSQWLGDRVITTSTRTWALPTYNNHLYKQISNSTSGGSSNDNAYFGYSTPWGYFDFNRFHCHFSPRDWQRLINNNWGFRPKRLNFKLFNIQVKEVTDNNGVKTIANNLTSTVQVFTDSDYQLPYVLGSAHEGCLPPFPADVFMIPQYGYLTLNDGSQAVGRSSFYCLEYFPSQMLRTGNNFQFSYEFENVPFHSSYAHSQSLDRLMNPLIDQYLYYLSKTINGSGQGQQTLKFSVAGPSNMAVQGRNYIPGPSYRQQRVSTTVTFNNNSEFAWPGASSWALNGRNSLMNPGPAMASHKEGEDRFFPLSGSLIFGKQGTGRDNVDADKVMITNEEEIKTTNPVATESYGQVATNHQSARAQAQTGWVQNQGILPGMVWQDRDVYLQGPIWAKIPHTDGNFHPSPLMGGFGMKHPPPQILIKNTPVPADPPTAFNKGKLNSFITQYSTGQVSVEIEWELQKENSKRWNPEIQYTSNYYKSNNVEFAVNTEGVYSEPRPIGTRYLTRNL

SEQ ID NO: 779 - DNA, 2208 bp, synthetic construct
  misc_feature 1..2208: note = Adeno Associated Virus Capsid Protein Variant
  source 1..2208: mol_type = other DNA
atggctgccgatggttatcttccagattggctcgaggacaaccttagtgaaggaattcgcgagtggtgggctttgaaacctggagcccctcaacccaaggcaaatcaacaacatcaagacaacgctcgaggtcttgtgcttccgggttacaaatacctaggacccggcaacggactcgacaagggggagccggtcaacgcagcagacgcggcggccctcgagcacgacaaggcctacgaccagcagctcaaggccggagacaacccgtacctcaagtacaaccacgccgacgccgagttccaggagcggctcaaagaagatacgtcttttgggggcaacctcgggcgagcagtcttccaggccaaaaagaggcttcttgaacctcttggtctggttgaggaagcggctaagacggctcctggaaagaagaggcctgtagagcagtctcctcaggaaccggactcctccgcgggtattggcaaatcgggtgcacagcccgctaaaaagagactcaatttcggtcagactggcgacacagagtcagtcccagaccctcaaccaatcggagaacctcccgcagccccctcaggtgtgggatctcttacaatggcttcaggtggtggcgcaccagtggcagacaataacgaaggtgccgatggagtgggtagttcctcgggaaattggcattgcgattcccaatggctgggggacagagtcatcaccaccagcacccgaacctgggccctgcccacctacaacaatcacctctacaagcaaatctccaacagcacatctggaggatcttcaaatgacaacgcctacttcggctacagcaccccctgggggtattttgacttcaacagattccactgccacttctcaccacgtgactggcagcgactcatcaacaacaactggggattccggcctaagcgactcaacttcaagctcttcaacattcaggtcaaagaggttacggacaacaatggagtcaagaccatcgccaataaccttaccagcacggtccaggtcttcacggactcagactatcagctcccgtacgtgctcgggtcggctcacgagggctgcctcccgccgttcccagcggacgttttcatgattcctcagtacgggtatctgacgcttaatgatggaagccaggccgtgggtcgttcgtccttttactgcctggaatatttcccgtcgcaaatgctaagaacgggtaacaacttccagttcagctacgagtttgagaacgtacctttccatagcagctacgctcacagccaaagcctggaccgactaatgaatccactcatcgaccaatacttgtactatctctcaaagactattaacggttctggacagggccaacaaacgctaaaattcagtgtggccggacccagcaacatggctgtccagggaagaaactacatacctggacccagctaccgacaacaacgtgtctcaaccactgtgacttttaacaacaacagcgaatttgcttggcctggagcttcttcttgggctctcaatggacgtaatagcttgatgaatcctggacctgctatggccagccacaaagaaggagaggaccgtttctttcctttgtctggatctttaatttttggcaaacaaggaactggaagagacaacgtggatgcggacaaagtcatgataaccaacgaagaagaaattaaaactactaacccggtagcaacggagtcctatggacaagtggccacaaaccaccagagtgcccgggcacaggcgcagaccggctgggttcaaaaccaaggaatacttccgggtatggtttggcaggacagagatgtgtacctgcaaggacccatttgggccaaaattcctcacacggacggcaactttcacccttctccgctgatgggagggtttggaatgaagcacccgcctcctcagatcctcatcaaaaacacacctgtacctgcggatcctccaacggccttcaacaagggcaagctgaactctttcatcacccagtattctactggccaagtcagcgtggagatcgagtgggagctgcagaaggaaaacagcaagcgctggaacccggagatccagtacacttccaactattacaagtctaataatgttgaatttgctgttaatactgaaggtgtatatagtgaaccccgccccattggcaccagatacctgactcgtaatctg

SEQ ID NO: 780 - protein, 736 aa, synthetic construct; identical to SEQ ID NO: 552
  REGION 1..736: note = Adeno Associated Virus Capsid Protein Variant

SEQ ID NO: 781 - DNA, 2208 bp, synthetic construct
  misc_feature 1..2208: note = Adeno Associated Virus Capsid Protein Variant
  source 1..2208: mol_type = other DNA
atggctgccgatggttatcttccagattggctcgaggacaaccttagtgaaggaattcgcgagtggtgggctttgaaacctggagcccctcaacccaaggcaaatcaacaacatcaagacaacgctcgaggtcttgtgcttccgggttacaaataccttggacccggcaacggactcgacaagggggagccggtcaacgcagcagacgcggcggccctcgagcacgacaaggcctacgaccagcagctcaaggccggagacaacccgtacctcaagtacaaccacgccgacgccgagttccaggagcggctcaaagaagatacgtcttttgggggcaacctcgggcgagcagtcttccaggccaaaaagaggcttcttgaacctcttggtctggttgaggaagcggctaagacggctcctggaaagaagaggcctgtagagcagtctcctcaggaaccggactcctccgcgggtattggcaaatcgggtgcacagcccgctaaaaagagactcaatttcggtcagactggcgacacagagtcagtcccagaccctcaaccaatcggagaacctcccgcagccccctcaggtgtgggatctcttacaatggcttcaggtggtggcgcaccagtggcagacaataacgaaggtgccgatggagtgggtagttcctcgggaaattggcattgcgattcccaatggctgggggacagagtcatcaccaccagcacccgaacctgggccctgcccacctacaactgtcacctctacaagcaaatctccaacagcacatctggaggatcttcaaatgacaacgcctacttcggctacagcaccccctgggggtattttgacttcaacagattccactgccacttctcaccacgtgactggcagcgactcatcaacaacaactggggattccggcctaagcgactcaacttcaagctcttcaacattcaggtcaaagaggttacggacaacaatggagtcaagaccatcgccaataaccttaccagcacggtccaggtcttcacggactcagactatcagctcccgtacgtgctcgggtcggctcacgagggctgcctcccgccgttcccagcggacgttttcatgattcctcagtacgggtatctgacgcttaatgatggaagccaggccgtgggtcgttcgtccttttactgcctggaatatttcccgtcgcaaatgctaagaacgggtaacaacttccagttcagctacgagtttgagaacgtacctttccatagcagctacgctcacagccaaagcctggaccgactaatgaatccactcatcgaccaatacttgtactatctctcaaagactattaacggttctggacagggccaacaaacgctaaaattcagtgtggccggacccagcaacatggctgtccagggaagaaactacatacctggacccagctaccgacaacaacgtgtctcaaccactgtgacttttaacaacaacagcgaatttgcttggcctggagcttcttcttgggctctcaatggacgtaatagcttgatgaatcctggacctgctatggccagccacaaagaaggagaggaccgtttctttcctttgtctggatctttaatttttggcaaacaaggaactggaagagacaacgtggatgcggacaaagtcatgataaccaacgaagaagaaattaaaactactaacccggtagcaacggagtcctatggacaagtggccacaaaccaccagagtgcccgggcacaggcgcagaccggctgggttcaaaaccaaggaatacttccgggtatggtttggcaggacagagatgtgtacctgcaaggacccatttgggccaaaattcctcacacggacggcaactttcacccttctccgctgatgggagggtttggaatgaagcacccgcctcctcagatcctcatcaaaaacacacctgtacctgcggatcctccaacggccttcaacaagggcaagctgaactctttcatcacccagtattctactggccaagtcagcgtggagatcgagtgggagctgcagaaggaaaacagcaagcgctggaacccggagatccagtacacttccaactattacaagtctaataatgttgaatttgctgttaatactgaaggtgtatatagtgaaccccgccccattggcaccagatacctgactcgtaatctg

SEQ ID NO: 782 - protein, 736 aa, synthetic construct
  REGION 1..736: note = Adeno Associated Virus Capsid Protein Variant
MAADGYLPDWLEDNLSEGIREWWALKPGAPQPKANQQHQDNARGLVLPGYKYLGPGNGLDKGEPVNAADAAALEHDKAYDQQLKAGDNPYLKYNHADAEFQERLKEDTSFGGNLGRAVFQAKKRLLEPLGLVEEAAKTAPGKKRPVEQSPQEPDSSAGIGKSGAQPAKKRLNFGQTGDTESVPDPQPIGEPPAAPSGVGSLTMASGGGAPVADNNEGADGVGSSSGNWHCDSQWLGDRVITTSTRTWALPTYNCHLYKQISNSTSGGSSNDNAYFGYSTPWGYFDFNRFHCHFSPRDWQRLINNNWGFRPKRLNFKLFNIQVKEVTDNNGVKTIANNLTSTVQVFTDSDYQLPYVLGSAHEGCLPPFPADVFMIPQYGYLTLNDGSQAVGRSSFYCLEYFPSQMLRTGNNFQFSYEFENVPFHSSYAHSQSLDRLMNPLIDQYLYYLSKTINGSGQGQQTLKFSVAGPSNMAVQGRNYIPGPSYRQQRVSTTVTFNNNSEFAWPGASSWALNGRNSLMNPGPAMASHKEGEDRFFPLSGSLIFGKQGTGRDNVDADKVMITNEEEIKTTNPVATESYGQVATNHQSARAQAQTGWVQNQGILPGMVWQDRDVYLQGPIWAKIPHTDGNFHPSPLMGGFGMKHPPPQILIKNTPVPADPPTAFNKGKLNSFITQYSTGQVSVEIEWELQKENSKRWNPEIQYTSNYYKSNNVEFAVNTEGVYSEPRPIGTRYLTRNL

SEQ ID NO: 783 - DNA, 2208 bp, synthetic construct
  misc_feature 1..2208: note = Adeno Associated Virus Capsid Protein Variant
  source 1..2208: mol_type = other DNA
atggctgccgatggttatcttccagattggctcgaggacaaccttagtgaaggaattcgcgagtggtgggctttgaaacctggagcccctcaacccaaggcaaatcaacaacatcaagacaacgctcgaggtcttgtgcttccgggttacaaataccttggacccggcaacggactcgacaagggggagccggtcaacgcagcagacgcggcggccctcgagcacgacaaggcctacgaccagcagctcaaggccggagacaacccgtacctcaagtacaaccacgccgacgccgagttccaggagcggctcaaagaagatacgtcttttgggggcaacctcgggcgagcagtcttccaggccaaaaagaggcttcttgaacctcttggtctggttgaggaagcggctaagacggctcctggaaagaagaggcctgtagagcagtctcctcaggaaccggactcctccgcgggtattggcaaatcgggtgcacagcccgctaaaaagagactcaatttcggtcagactggcgacacagagtcagtcccagaccctcaaccaatcggagaacctcccgcagccccctcaggtgtgggatctcttacaatggcttcaggtggtggcgcaccagtggcagacaataacgaaggtgccgatggagtgggtagttcctcgggaaattggcattgcgattcccaatggctgggggacagagtcatcaccaccagcacccgaacctgggccctgcccacctacaacaatcacctctacaagcaaatctccaacagcacatctggaggatcttcaaatgacaacgcctacttcggctacagcaccccctgggggtattttgacttcaacagattccactgccacttctcaccacgtgactggcagcgactcatcaacaacaactggggattccggcctaagcgactcaacttcaagctcttcaacattcaggtcaaagaggttacggacaacaatggagtcaagaccatcgccaataaccttaccagcacggtccaggtcttcacggactcagactatcagctcccgtacgtgctcgggtcggctcacgagggctgcctcccgccgttcccagcggacgttttcatgattcctcagtacgggtatctgacgcttaatgatggaagccaggccgtgggtcgttcgtccttttactgcctggaatatttcccgtcgcaaatgctaagaacgggtaacaacttccagttcagctacgagtttgagaacgtacctttccatagcagctacgctcacagccaaagcctggaccgactaatgaatccactcatcgaccaatacttgtactatctctcaaagactattaacggttctggacagggccaacaaacgctaaaattcagtgtggccggacccagcaacatggctgtccagggaagaaactacatacctggacccagctaccgacaacaacgtgtctcaaccactgtgacttttaacaacaacagcgaatttgcttggcctggagcttcttcttgggctctcaatggacgtaatagcttgatgaatcctggacctgctatggccagccacaaagaaggagaggaccgtttctttcctttgtctggatctttaatttttggcaaacaaggaactggaagagacaacgtggatgcggacaaagtcatgataaccaacgaagaagaaattaaaactactaacccggtagcaacggagtcctatggacaagtggccacaaaccaccagagtgcccgggcacaggcgcagaccgtatgggttcaaaaccaaggaatacttccgggtatggtttggcaggacagagatgtgtacctgcaaggacccatttgggccaaaattcctcacacggacggcaactttcacccttctccgctgatgggagggtttggaatgaagcacccgcctcctcagatcctcatcaaaaacacacctgtacctgcggatcctccaacggccttcaacaagggcaagctgaactctttcatcacccagtattctactggccaagtcagcgtggagatcgagtgggagctgcagaaggaaaacagcaagcgctggaacccggagatccagtacacttccaactattacaagtctaataatgttgaatttgctgttaatactgaaggtgtatatagtgaaccccgccccattggcaccagatacctgactcgtaatctg

SEQ ID NO: 784 - protein, 736 aa, synthetic construct
  REGION 1..736: note = Adeno Associated Virus Capsid Protein Variant
MAADGYLPDWLEDNLSEGIREWWALKPGAPQPKANQQHQDNARGLVLPGYKYLGPGNGLDKGEPVNAADAAALEHDKAYDQQLKAGDNPYLKYNHADAEFQERLKEDTSFGGNLGRAVFQAKKRLLEPLGLVEEAAKTAPGKKRPVEQSPQEPDSSAGIGKSGAQPAKKRLNFGQTGDTESVPDPQPIGEPPAAPSGVGSLTMASGGGAPVADNNEGADGVGSSSGNWHCDSQWLGDRVITTSTRTWALPTYNNHLYKQISNSTSGGSSNDNAYFGYSTPWGYFDFNRFHCHFSPRDWQRLINNNWGFRPKRLNFKLFNIQVKEVTDNNGVKTIANNLTSTVQVFTDSDYQLPYVLGSAHEGCLPPFPADVFMIPQYGYLTLNDGSQAVGRSSFYCLEYFPSQMLRTGNNFQFSYEFENVPFHSSYAHSQSLDRLMNPLIDQYLYYLSKTINGSGQGQQTLKFSVAGPSNMAVQGRNYIPGPSYRQQRVSTTVTFNNNSEFAWPGASSWALNGRNSLMNPGPAMASHKEGEDRFFPLSGSLIFGKQGTGRDNVDADKVMITNEEEIKTTNPVATESYGQVATNHQSARAQAQTVWVQNQGILPGMVWQDRDVYLQGPIWAKIPHTDGNFHPSPLMGGFGMKHPPPQILIKNTPVPADPPTAFNKGKLNSFITQYSTGQVSVEIEWELQKENSKRWNPEIQYTSNYYKSNNVEFAVNTEGVYSEPRPIGTRYLTRNL

SEQ ID NO: 785 - DNA, 2208 bp, synthetic construct
  misc_feature 1..2208: note = Adeno Associated Virus Capsid Protein Variant
  source 1..2208: mol_type = other DNA
atggctgccgatggttatcttccagattggctcgaggacaaccttagtgaaggaattcgcgagtggtgggctttgaaacctggagcccctcaacccaaggcaaatcaacaacatcaagacaacgctcgaggtcttgtgcttccgggttacaaataccttggacccggcaacggactcgacaagggggagccggtcaacgcagcagacgcggcggccctcgagcacgacaaggcctacgaccagcagctcaaggccggagacaacccgtacctcaagtacaaccacgccgacgccgagttccaggagcggctcaaagaagatacgtcttttgggggcaacctcgggcgagcagtcttccaggccaaaaagaggcttcttgaacctcttggtctggttgaggaagcggctaagacggctcctggaaagaagaggcctgtagagcagtctcctcaggaaccggactcctccgcgggtattggcaaatcgggtgcacagcccgctaaaaagagactcaatttcggtcagactggcgacacagagtcagtcccagaccctcaaccaatcggagaacctcccgcagccccctcaggtgtgggatctcttacaatggcttcaggtggtggcgcaccagtggcagacaataacgaaggtgccgatggagtgggtagttcctcgggaaattggcattgcgattcccaatggctgggggacagagtcatcaccaccagcacccgaacctgggccctgcccacctacaacaatcacctctacaagcaaatctccaacagcacatctggaggatcttcaaatgacaacgcctacttcggctacagcaccccctgggggtattttgacttcaacagattccactgccacttctcaccacgtgactggcagcgactcatcaacaacaactggggattccggcctaagcgactcaacttcaagctcttcaacattcaggtcaaagaggttacggacaacaatggagtcaagaccatcgccaataaccttaccagcacggtccaggtcttcacggactcagactatcagctcccgtacgtgctcgggtcggctcacgagggctgcctcccgccgttcccagcggacgttttcatgattcctcagtacgggtatctgacgcttaatgatggaagccaggccgtgggtcgttcgtccttttactgcctggaatatttcccgtcgcaaatgctaagaacgggtaacaacttccagttcagctacgagtttgagaacgtacctttccatagcagctacgctcacagccaaagcctggaccgactaatgaatccactcatcgaccaatacttgtactatctctcaaagactattaacggttctggacagggccaacaaacgctaaaattcagtgtggccggatggagcaacatggctgtccagggaagaaactacatacctggacccagctaccgacaacaacgtgtctcaaccactgtgacttttaacaacaacagcgaatttgcttggcctggagcttcttcttgggctctcaatggacgtaatagcttgatgaatcctggacctgctatggccagccacaaagaaggagaggaccgtttctttcctttgtctggatctttaatttttggcaaacaaggaactggaagagacaacgtggatgcggacaaagtcatgataaccaacgaagaagaaattaaaactactaacccggtagcaacggagtcctatggacaagtggccacaaaccaccagagtgcccgggcacaggcgctgaccggctgggttcaaaaccaaggaatacttccgggtatggtttggcaggacagagatgtgtacctgcaaggacccatttgggccaaaattcctcacacggacggcaactttcacccttctccgctgatgggagggtttggaatgaagcacccgcctcctcagatcctcatcaaaaacacacctgtacctgcggatcctccaacggccttcaacaagggcaagctgaactctttcatcacccagtattctactggccaagtcagcgtggagatcgagtgggagctgcagaaggaaaacagcaagcgctggaacccggagatccagtacacttccaactattacaagtctaataatgttgaatttgctgttaatactgaaggtgtatatagtgaaccccgccccattggcaccagatacctgactcgtaatctg

SEQ ID NO: 786 - protein, 736 aa, synthetic construct
  REGION 1..736: note = Adeno Associated Virus Capsid Protein Variant
MAADGYLPDWLEDNLSEGIREWWALKPGAPQPKANQQHQDNARGLVLPGYKYLGPGNGLDKGEPVNAADAAALEHDKAYDQQLKAGDNPYLKYNHADAEFQERLKEDTSFGGNLGRAVFQAKKRLLEPLGLVEEAAKTAPGKKRPVEQSPQEPDSSAGIGKSGAQPAKKRLNFGQTGDTESVPDPQPIGEPPAAPSGVGSLTMASGGGAPVADNNEGADGVGSSSGNWHCDSQWLGDRVITTSTRTWALPTYNNHLYKQISNSTSGGSSNDNAYFGYSTPWGYFDFNRFHCHFSPRDWQRLINNNWGFRPKRLNFKLFNIQVKEVTDNNGVKTIANNLTSTVQVFTDSDYQLPYVLGSAHEGCLPPFPADVFMIPQYGYLTLNDGSQAVGRSSFYCLEYFPSQMLRTGNNFQFSYEFENVPFHSSYAHSQSLDRLMNPLIDQYLYYLSKTINGSGQGQQTLKFSVAGWSNMAVQGRNYIPGPSYRQQRVSTTVTFNNNSEFAWPGASSWALNGRNSLMNPGPAMASHKEGEDRFFPLSGSLIFGKQGTGRDNVDADKVMITNEEEIKTTNPVATESYGQVATNHQSARAQALTGWVQNQGILPGMVWQDRDVYLQGPIWAKIPHTDGNFHPSPLMGGFGMKHPPPQILIKNTPVPADPPTAFNKGKLNSFITQYSTGQVSVEIEWELQKENSKRWNPEIQYTSNYYKSNNVEFAVNTEGVYSEPRPIGTRYLTRNL

SEQ ID NO: 787 - DNA, 2208 bp, synthetic construct
  misc_feature 1..2208: note = Adeno Associated Virus Capsid Protein Variant
  source 1..2208: mol_type = other DNA
atggctgccgatggttatcttccagattggctcgaggacaaccttagtgaaggaattcgcgagtggtgggctttgaaacctggagcccctcaacccaaggcaaatcaacaacatcaagacaacgctcgaggtcttgtgcttccgggttacaaataccttggacccggcaacggactcgacaagggggagccggtcaacgcagcagacgcggcggccctcgagcacgacaaggcctacgaccagcagctcaaggccggagacaacccgtacctcaagtacaaccacgccgacgccgagttccaggagcggctcaaagaagatacgtcttttgggggcaacctcgggcgagcagtcttccaggccaaaaagaggcttcttgaacctcttggtctggttgaggaagcggctaagacggctcctggaaagaagaggcctgtagagcagtctcctcaggaaccggactcctccgcgggtattggcaaatcgggtgcacagcccgctaaaaagagactcaatttcggtcagactggcgacacagagtcagtcccagaccctcaaccaatcggagaacctcccgcagccccctcaggtgtgggatctcttacaatggcttcaggtggtggcgcaccagtggcagacaataacgaaggtgccgatggagtgggtagttcctcgggaaattggcattgcgattcccaatggctgggggacagagtcatcaccaccagcacccgaacctgggccctgcccacctacaacaatcacctctacaagcaaatctccaacagcacatctggaggatcttcaaatgacaacgcctacttcggctacagcaccccctgggggtattttgacttcaacagattccactgccacttctcaccacgtgactggcagcgactcatcaacaacaactggggattccggcctaagcgactcaacttcaagctcttcaacattcaggtcaaagaggttacggacaacaatggagtcaagaccatcgccaataaccttaccagcacggtccaggtcttcacggactcagactatcagctcccgtacgtgctcgggtcggctcacgagggctgcctcccgccgttcccagcggacgttttcatgattcctcagtacgggtatctgacgcttaatgatggaagccaggccgtgggtcgttcgtccttttactgcctggaatatttcccgtcgcaaatgctaagaacgggtaacaacttccagttcagctacgagtttgagaacgtacctttccatagcagctacgctcacagccaaagcctggaccgactaatgaatccactcatcgaccaatacttgtactatctctcaaagactcctaacggttctggacagggccaacaaacgctaaaattcagtgtggccggacccagcaacatggctgtccagggaagaaactacatacctggacccagctaccgacaacaacgtgtctcaaccactgtgacttttaacaacaacagcgaatttgcttggcctggagcttcttcttgggctctcaatggacgtaatagcttgatgaatcctggacctgctatggccagccacaaagaaggagaggaccgtttctttcctttgtctggatctttaatttttggcaaacaaggaactggaagagacaacgtggatgcggacaaagtcatgataaccaacgaagaagaaattaaaactactaacccggtagcaacggagtcctatggacaagtggccacaaaccaccagagtgcccgggcacaggcgcagaccggctgggttcaaaaccaaggaatacttccgggtatggtttggcaggacagagatgtgtacctgcaaggacccatttgggccaaaattcctcacacggacggcaactttcacccttctccgctgatgggagggtttggaatgaagcacccgcctcctcagatcctcatcaaaaacacacctgtacctgcggatcctccaacggccttcaacaagggcaagctgaactctttcatcacccagtattctactggccaagtcagcgtggagatcgagtgggagctgcagaaggaaaacagcaagcgctggaacccggagatccagtacacttccaactattacaagtctaataatgttgaatttgctgttaatactgaaggtgtatatagtgaaccccgccccattggcaccagatacctgactcgtaatctg

SEQ ID NO: 788 - protein, 736 aa, synthetic construct
  REGION 1..736: note = Adeno Associated Virus Capsid Protein Variant
MAADGYLPDWLEDNLSEGIREWWALKPGAPQPKANQQHQDNARGLVLPGYKYLGPGNGLDKGEPVNAADAAALEHDKAYDQQLKAGDNPYLKYNHADAEFQERLKEDTSFGGNLGRAVFQAKKRLLEPLGLVEEAAKTAPGKKRPVEQSPQEPDSSAGIGKSGAQPAKKRLNFGQTGDTESVPDPQPIGEPPAAPSGVGSLTMASGGGAPVADNNEGADGVGSSSGNWHCDSQWLGDRVITTSTRTWALPTYNNHLYKQISNSTSGGSSNDNAYFGYSTPWGYFDFNRFHCHFSPRDWQRLINNNWGFRPKRLNFKLFNIQVKEVTDNNGVKTIANNLTSTVQVFTDSDYQLPYVLGSAHEGCLPPFPADVFMIPQYGYLTLNDGSQAVGRSSFYCLEYFPSQMLRTGNNFQFSYEFENVPFHSSYAHSQSLDRLMNPLIDQYLYYLSKTPNGSGQGQQTLKFSVAGPSNMAVQGRNYIPGPSYRQQRVSTTVTFNNNSEFAWPGASSWALNGRNSLMNPGPAMASHKEGEDRFFPLSGSLIFGKQGTGRDNVDADKVMITNEEEIKTTNPVATESYGQVATNHQSARAQAQTGWVQNQGILPGMVWQDRDVYLQGPIWAKIPHTDGNFHPSPLMGGFGMKHPPPQILIKNTPVPADPPTAFNKGKLNSFITQYSTGQVSVEIEWELQKENSKRWNPEIQYTSNYYKSNNVEFAVNTEGVYSEPRPIGTRYLTRNL

SEQ ID NO: 789 - DNA, 2208 bp, synthetic construct
  misc_feature 1..2208: note = Adeno Associated Virus Capsid Protein Variant
  source 1..2208: mol_type = other DNA
atggctgccgatggttatcttccagattggctcgaggacaaccttagtgaaggaattcgcgagtggtgggctttgaaacctggagcccctcaacccaaggcaaatcaacaacatcaagacaacgctcgaggtcttgtgcttccgggttacaaataccttggacccggcaacggactcgacaagggggagccggtcaacgcagcagacgcggcggccctcgagcacgacaaggcctacgaccagcagctcaaggccggagacaacccgtacctcaagtacaaccacgccgacgccgagttccaggagcggctcaaagaagatacgtcttttgggggcaacctcgggcgagcagtcttccaggccaaaaagaggcttcttgaacctcttggtctggttgaggaagcggctaagacggctcctggaaagaagaggcctgtagagcagtctcctcaggaaccggactcctccgcgggtattggcaaatcgggtgcacagcccgctaaaaagagactcaatttcggtcagactggcgacacagagtcagtcccagaccctcaaccaatcggagaacctcccgcagccccctcaggtgtgggatctcttacaatggcttcaggtggtggcgcaccagtggcagacaataacgaaggtgccgatggagtgggtagttcctcgggaaattggcattgcgattcccaatggctgggggacagagtcatcaccaccagcacccgaacctgggccctgcccacctacaacaatcacctctacaagcaaatctccaacagcacatctggaggatcttcaaatgacaacgcctacttcggctacagcacaccctgggggtattttgacttcaacagattccactgccacttctcaccacgtgactggcagcgactcatcaacaacaactggggattccggcctaagcgactcaacttcaagctcttcaacattcaggtcaaagaggttacggacaacaatggagtcaagaccatcgccaataaccttaccagcacggtccaggtcttcacggactcagactatcagctcccgtacgtgctcgggtcggctcacgagggctgcctcccgccgttcccagcggacgttttcatgattcctcagtacgggtatctgacgcttaatgatggaagccaggccgtgggtcgttcgtccttttactgcctggaatatttcccgtcgcaaatgctaagaacgggtaacaacttccagttcagctacgagtttgagaacgtacctttccatagcagctacgctcacagccaaagcctggaccgactaatgaatccactcatcgaccaatacttgtactatctctcaaagactattaacggttctggacagggccaacaaacgctaaaattcagtgtggccggacccagcaacatggctgtccagggaagaaactacatacctggacccagctaccgacaacaacgtgtctcaaccactgtgacttttaacaacaacagcgaatttgcttggcctggagcttcttcttgggctctcaatggacgtaatagcttgatgaatcctggacctgctatggccagccacaaagaaggagaggaccgtttctttcctttgtctggatctttaatttttggcaaacaaggaactggaagagacaacgtggatgcggacaaagtcatgataaccaacgaagaagaaattaaaactactaacccggtagcaacggagtcctatggacaagtggccacaaaccaccagagtgcccgggcacaggcgcagaccggctgggttcaaaaccaaggaatacttccgggtatggtttggcaggacagagatgtgtacctgcaaggacccatttgggccaaaattcctcacacggacggcaactttcacccttctccgctgatgggagggtttggaatgaagcacccgcctcctcagatcctcatcaaaaacacacctgtacctgcggatcctccaacggccttcaacaagggcaagctgaactctttcatcactcagtattctactggccaagtcagcgtggagatcgagtgggagctgcagaaggaaaacagcaagcgctggaacccggagatccagtacacttccaactattacaagtctaataatgttgaatttgctgttaatactgaaggtgtatatagtgaaccccgccccattggcaccagatacctgactcgtaatctg

SEQ ID NO: 790 - protein, 736 aa, synthetic construct; identical to SEQ ID NO: 552
  REGION 1..736: note = Adeno Associated Virus Capsid Protein Variant

SEQ ID NO: 791 - DNA, 2208 bp, synthetic construct
  misc_feature 1..2208: note = Adeno Associated Virus Capsid Protein Variant
  source 1..2208: mol_type = other DNA
atggctgccgatggttatcttccagattggctcgaggacaaccttagtgaaggaattcgcgagtggtgggctttgaaacctggagcccctcaacccaaggcaaatcaacaacatcaagacaacgctcgaggtcttgtgcttccgggttacaaataccttggacccggcaacggactcgacaagggggagccggtcaacgcagcagacgcggcggccctcgagcacgacaaggcctacgaccagcagctcaaggccggagacaacccgtacctcaagtacaaccacgccgacgccgagactcaggagcggctcaaagaagatacgtcttttgggggcaacctcgggcgagcagtcttccaggccaaaaagaggcttcttgaacctcttggtctggttgaggaagcggctaagacggctcctggaaagaagaggcctgtagagcagtctcctcaggaaccggactcctccgcgggtattggcaaatcgggtgcacagcccgctaaaaagagactcaatttcggtcagactggcgacacagagtcagtcccagaccctcaaccaatcggagaacctcccgcagccccctcaggtgtgggatctcttacaatggcttcaggtggtggcgcaccagtggcagacaataacgaaggtgccgatggagtgggtagttcctcgggaaattggcattgcgattcccaatggctgggggacagagtcatcaccaccagcacccgaacctgggccctgcccacctacaacaatcacctctacaagcaaatctccaacagcacatctggaggatcttcaaatgacaacgcctacttcggctacagcaccccctgggggtattttgacttcaacagattccactgccacttctcaccacgtgactggcagcgactcatcaacaacaactggggattccggcctaagcgactcaacttcaagctcttcaacattcaggtcaaagaggttacggacaacaatggagtcaagaccatcgccaataaccttaccagcacggtccaggtcttcacggactcagactatcagctcccgtacgtgctcgggtcggctcacgagggctgcctcccgccgttcccagcggacgttttcatgattcctcagtacgggtatctgacgcttaatgatggaagccaggccgtgggtcgttcgtccttttactgcctggaatatttcccgtcgcaaatgctaagaacgggtaacaacttccagttcagctacgagtttgagaacgtacctttccatagcagctacgctcacagccaaagcctggaccgactaatgaatccactcatcgaccaatacttgtactatctctcaaagactattaacggttctggacagggccaacaaacgctaaaattcagtgtggccggacccagcaacatggctgtccagggaagaaactacatacctggacccagctaccgacaacaacgtgtctcaaccactgtgacttttaacaacaacagcgaatttgcttggcctggagcttcttcttgggctctcaatggacgtaatagcttgatgaatcctggacctgctatggccagccacaaagaaggagaggaccgtttctttcctttgtctggatctttaatttttggcaaacaaggaactggaagagacaacgtggatgcggacaaagtcatgataaccaacgaagaagaaattaaaactactaacccggtagcaacggagtcctatggacaagtggccacaaaccaccagagtgcccgggcacaggcgcagaccggctgggttcaaaaccaaggaatacttccgggtatggtttggcaggacagagatgtgtacctgcaaggacccatttgggccaaaattcctcacacggacggcaactttcacccttctccgctgatgggagggtttggaatgaagcacccgcctcctcagatcctcatcaaaaacacacctgtacctgcggatcctccaacggccttcaacaagggcaagctgaactctttcatcacccagtattctactggccaagtcagcgtggagatcgagtgggagctgcagaaggaaaacagcaagcgctggaacccggagatccagtacacttccaactattacaagtctaataatgttgaatttgctgttaatactgaaggtgtatatagtgaaccccgccccattggcaccagatacctgactcgtaatctg

SEQ ID NO: 792 - protein, 736 aa, synthetic construct
  REGION 1..736: note = Adeno Associated Virus Capsid Protein Variant
MAADGYLPDWLEDNLSEGIREWWALKPGAPQPKANQQHQDNARGLVLPGYKYLGPGNGLDKGEPVNAADAAALEHDKAYDQQLKAGDNPYLKYNHADAETQERLKEDTSFGGNLGRAVFQAKKRLLEPLGLVEEAAKTAPGKKRPVEQSPQEPDSSAGIGKSGAQPAKKRLNFGQTGDTESVPDPQPIGEPPAAPSGVGSLTMASGGGAPVADNNEGADGVGSSSGNWHCDSQWLGDRVITTSTRTWALPTYNNHLYKQISNSTSGGSSNDNAYFGYSTPWGYFDFNRFHCHFSPRDWQRLINNNWGFRPKRLNFKLFNIQVKEVTDNNGVKTIANNLTSTVQVFTDSDYQLPYVLGSAHEGCLPPFPADVFMIPQYGYLTLNDGSQAVGRSSFYCLEYFPSQMLRTGNNFQFSYEFENVPFHSSYAHSQSLDRLMNPLIDQYLYYLSKTINGSGQGQQTLKFSVAGPSNMAVQGRNYIPGPSYRQQRVSTTVTFNNNSEFAWPGASSWALNGRNSLMNPGPAMASHKEGEDRFFPLSGSLIFGKQGTGRDNVDADKVMITNEEEIKTTNPVATESYGQVATNHQSARAQAQTGWVQNQGILPGMVWQDRDVYLQGPIWAKIPHTDGNFHPSPLMGGFGMKHPPPQILIKNTPVPADPPTAFNKGKLNSFITQYSTGQVSVEIEWELQKENSKRWNPEIQYTSNYYKSNNVEFAVNTEGVYSEPRPIGTRYLTRNL

SEQ ID NO: 793 - DNA, 2208 bp, synthetic construct
  misc_feature 1..2208: note = Adeno Associated Virus Capsid Protein Variant
  source 1..2208: mol_type = other DNA
atggctgccgatggttatcttccagattggctcgaggacaaccttagtgaaggaattcgcgagtggtgggctttgaaacctggagcccctcaacccaaggcaaatcaacaacatcaagacaacgctcgaggtcttgtgcttccgggttacaaataccttggacccggcaacggactcgacaagggggagccggtcaacgcagcagacgcggcggccctcgagcacgacaaggcctacgaccagcagctcaaggccggagacaacccgtacctcaagtacaaccacgccgacgccgagttccaggagcggctcaaagaagatacgtcttttgggggcaacctcgggcgagcagtcttccaggccaaaaagaggcttcttgaacctcttggtctggttgaggaagcggctaagacggctcctggaaagaagaggcctgtagagcagtctcctcaggaaccggactcctccgcgggtattggcaaatcgggtgcacagcccgctaaaaagagactcaatttcggtcagactggcgacacagagtcagtcccagaccctcaaccaatcggagaacctcccgcagccccctcaggtgtgggatctcttacaatggcttcaggcggtggcgcaccagtggcagacaataacgaaggtgccgatggagtgggtagttcctcgggaaattggcattgcgattcccaatggctgggggacagagtcatcaccaccagcacccgaacctgggccctgcccacctacaacaatcacctctacaagcaaatctccaacagcacatctggaggatcttcaaatgacaacgcctacttcggctacagcaccccctgggggtattttgacttcaacagattccactgccacttctcaccacgtgactggcagcgactcatcaacaacaactggggattccggcctaagcgactcaacttcaagctcttcaacattcaggtcaaagaggttacggacaacaatggagttaagaccatcgccaataaccttaccagcacggtccaggtcttcacggactcagactatcagctcccgtacgtgctcgggtcggctcacgagggctgcctcccgccgttcccagcggacgttttcatgattcctcagtacgggtatctgacgcttaatgatggaagccaggccgtgggtcgttcgtccttttactgcctggaatatttcccgtcgcaaatgctaagaacgggtaacaacttccagttcagctacgagtttgagaacgtacctttccatagcagctacgctcacagccaaagcctggaccgactaatgaatccactcatcgaccaatacttgtactatctctcaaagactattaacggttctggacagggccaacaaacgctaaaattcagtgtggccggacccagcaacatggctgtccagggaagaaactacatacctggacccagctaccgacaacaacgtgtctcaaccactgtgacttttaacaacaacagcgaatttgcttggcctggagcttcttcttgggctctcaatggacgtaatagcttgatgaatcctggacctgctatggccagccacaaagaaggagaggaccgtttctttcctttgtctggatctttaatttttggcaaacaaggaactggaagagacaacgtggatgcggacaaagtcatgataaccaacgaagaagaaattaaaactactaacccggtagcaacggagtcctatggacaagtggccacaaaccaccagagtgcccgggcacaggcgcagaccggctgggttcaaaaccaaggaatacttccgggtatggtttggcaggacagagatgtgtacctgcaaggacccatttgggccaaaattcctcacacggacggcaactttcacccttctccgctgatgggagggtttggaatgaagcacccgcctcctcagatcctcatcaaaaacacacctgtacctgcggatcctccaacggccttcaacaagggcaagctgaactctttcatcacccagtattctactggccaagtcagcgtggagatcgagtgggagctgcagaaggaaaacagcaagcgctggaacccggagatccagtacacttccaactattacaagtctaataatgttgaatttgctgttaatactgaaggtgtatatagtgaaccccgccccattggcaccagatacctgactcgtaatctg

SEQ ID NO: 794 - protein, 736 aa, synthetic construct; identical to SEQ ID NO: 552
  REGION 1..736: note = Adeno Associated Virus Capsid Protein Variant

SEQ ID NO: 795 - DNA, 2208 bp, synthetic construct
  misc_feature 1..2208: note = Adeno Associated Virus Capsid Protein Variant
  source 1..2208: mol_type = other DNA
atggctgccgatggttatcttccagattggctcgaggacaaccttagtgaaggaattcgcgagtggtgggctttgaaacctggagcccctcaacccaaggcaaatcaacaacatcaagacaacgctcgaggtcttgtgcttccgggttacaaataccttggacccggcaacggactcgacaagggggagccggtcaacgcagcagacgcggcggccctcgagcacgacaaggcctacgaccagcagctcaaggccggagacaacccgtacctcaagtacaaccacgccgacgccgagttccaggagcggctcaaagaagatacgtcttttgggggcaacctcgggcgagcagtcttccaggccaaaaagaggcttcttgaacctcttggtctggttgaggaagcggctaagacggctcctggaaagaagaggcctgtagagcagtctcctcaggaaccggactcctccgcgggtattggcaaatcgggtgcacagcccgctaaaaagagactcaatttcggtcagactggcgacacagagtcagtcccagaccctcaaccaatcggagaacctcccgcagccccctcaggtgtgggatctcttacaatggcttcaggtggtggcgcaccagtggcagacaataacgaaggtgccgatggagtgggtagttcctcgggaaattggcattgcgattcccaatggctgggggacagagtcatcaccaccagcacccgaacctgggccctgcccacctacaacaatcacctctacaagcaaatctccaacagcacatctggaggatcttcaaatgacaacgcctacttcggctacagcaccccctgggggtattttgacttcaacagattccactgccacttctcaccacgtgactggcagcgactcatcaacaacaactggggattccggcctaagcgactcaacttcaagctcttcaacattcaggtcaaagaggttacggacaacaatggagtcaagaccatcgccaataaccttaccagcacggtccaggtcttcacggactcagactatcagctcccgtacgtgctcgggtcggctcacgagggctgcctcccgccgttcccagcggacgttttcatgattcctcagtacgggtatctgacgcttaatgatggaagccaggccgtgggtcgttcgtccttttactgcctggaatatttcccgtcgcaaatgctaagaacgggtaacaacttccagttcagctacgagtttgagaacgtacctttccatagcagctacgctcacagccaaagcctggaccgactaatgaatccactcatcgaccaatacttgtactatctctcaaagactattaacggttctggacagggccaacaaacgctaaaattcagtgtggccggacccagcaacatggctgtccagggaagaaactacatacctggacccagctaccgacaacaacgtgtctcaaccactgtgacttttaacaacaacagcgaatttgcttggcctggagcttcttcttgggctctcaatggacgtaatagcttgatgaatcctggacctgctatggccagccacaaagaaggagaggaccgtttctttcctttgtctggatctttaatttttggcaaacaaggaactggaagagacaacgtggatgcggacaaagtcatgataaccaacgaagaagaaattaaaactactaacccggtagcaacggagtcctatggacaagtggccacaaaccaccagagtgcccgggcacaggcgcagaccacatgggttcaaaaccaaggaatacttccgggtatggtttggcaggacagagatgtgtacctgcaaggacccatttgggccaaaattcctcacacggacggcaactttcacccttctccgctgatgggagggtttggaatgaagcacccgcctcctcagatcctcatcaaaaacacacctgtacctgcggatcctccaacggccttcaacaagggcaagctgaactctttcatcacccagtattctactggccaagtcagcgtggagatcgagtgggagctgcagaaggaaaacagcaagcgctggaacccggagatccagtacacttccaactattacaagtctaataatgttgaatttgctgttaatactgaaggtgtatatagtgaaccccgccccattggcaccagatacctgactcgtaatctg

SEQ ID NO: 796 - protein, 736 aa, synthetic construct
  REGION 1..736: note = Adeno Associated Virus Capsid Protein Variant
MAADGYLPDWLEDNLSEGIREWWALKPGAPQPKANQQHQDNARGLVLPGYKYLGPGNGLDKGEPVNAADAAALEHDKAYDQQLKAGDNPYLKYNHADAEFQERLKEDTSFGGNLGRAVFQAKKRLLEPLGLVEEAAKTAPGKKRPVEQSPQEPDSSAGIGKSGAQPAKKRLNFGQTGDTESVPDPQPIGEPPAAPSGVGSLTMASGGGAPVADNNEGADGVGSSSGNWHCDSQWLGDRVITTSTRTWALPTYNNHLYKQISNSTSGGSSNDNAYFGYSTPWGYFDFNRFHCHFSPRDWQRLINNNWGFRPKRLNFKLFNIQVKEVTDNNGVKTIANNLTSTVQVFTDSDYQLPYVLGSAHEGCLPPFPADVFMIPQYGYLTLNDGSQAVGRSSFYCLEYFPSQMLRTGNNFQFSYEFENVPFHSSYAHSQSLDRLMNPLIDQYLYYLSKTINGSGQGQQTLKFSVAGPSNMAVQGRNYIPGPSYRQQRVSTTVTFNNNSEFAWPGASSWALNGRNSLMNPGPAMASHKEGEDRFFPLSGSLIFGKQGTGRDNVDADKVMITNEEEIKTTNPVATESYGQVATNHQSARAQAQTTWVQNQGILPGMVWQDRDVYLQGPIWAKIPHTDGNFHPSPLMGGFGMKHPPPQILIKNTPVPADPPTAFNKGKLNSFITQYSTGQVSVEIEWELQKENSKRWNPEIQYTSNYYKSNNVEFAVNTEGVYSEPRPIGTRYLTRNL

SEQ ID NO: 797 - DNA, 2208 bp, synthetic construct
  misc_feature 1..2208: note = Adeno Associated Virus Capsid Protein Variant
  source 1..2208: mol_type = other DNA
atggctgccgatggttatcttccagattggctcgaggacaaccttagtgaaggaattcgcgagtggtgggctttgaaacctggagcccctcaacccaaggcaaatcaacaacatcaagacaacgctcgaggtcttgtgcttccgggttacaaataccttggacccggcaacggactcgacaagggggagccggtcaacgcagcagacgcggcggccctcgagcacgacaaggcctacgaccagcagctcaaggccggagacaacccgtacctcaagtacaaccacgccgacgccgagttccaggagcggctcaaagaagatacgtcttttgggggcaacctcgggcgagcagtcttccaggccaaaaagaggcttcttgaacctcttggtctggttgaggaagcggctaagacggctcctggaaagaagaggcctgtagagcagtctcctcaggaaccggactcctccgcgggtattggcaaatcgggtgcacagcccgctaaaaagagactcaatttcggtcagactggcgacacagagtcagtcccagaccctcaaccaatcggagaacctcccgcagccccctcaggtgtgggatctcttacaatggcttcaggtggtggcgcaccagtggcagacaataacgaaggtgccgatggagtgggtagttcctcgggaaattggcattgcgattcccaatggctgggggacagagtcatcaccaccagcacccgaacctgggccctgcccacctacaacaatcacctctacaagcaaatctccaacagcacatctggaggatcttcaaatgacaacgcctacttcggctacagcaccccctgggggtattttgacttcaacagattccactgccacttctcaccacgtgactggcagcgactcatcaacaacaactggggattccggcctaagcgactcaacttcaagctcttcaacattcaggtcaaagaggttacggacaacaatggagtcaagaccatcgccaataaccttaccagcacggtccaggtcttcacggactcagactatcagctcccgtacgtgctcgggtcggctcacgagggctgcctcccgccgttcccagcggacgttttcatgattcctcagtacgggtatctgacgcttaatgatggaagccaggccgtgggtcgttcgtccttttactgcctggaatatttcccgtcgcaaatgctaagaacgggtaacaacttccagttcagctacgagtttgagaacgtacctttccatagcagctacgctcacagccaaagcctggaccgactaatgaatccactcatcgaccaatacttgtactatctctcaaagactattaacggttctggacagggccaacaaacgctaaaattcagtgtggccggacccagcaacatggctgtccagggaagaaactacatacctggacccagctaccgacaacaacgtgtctcaaccactgtgacttttaacaacaacagcgaatttgcttggcctggagcttcttcttgggctctcaatggacgtaatagcttgatgaatcctggacctgctatggccagccacaaagaaggagaggaccgtttctttcctttgtctggatctttaatttttggcaaacaaggaactggaagagacaacgtggatgcggacaaagtctgtataaccaacgaagaagaaattaaaactactaacccggtagcaacggagtcctatggacaagtggccacaaaccaccagagtgcccgggcacaggcgcagaccggctgggttcaaaaccaaggaatacttccgggtatggtttggcaggacagagatgtgtacctgcaaggacccatttgggccaaaattcctcacacggacggcaactttcacccttctccgctgatgggagggtttggaatgaagcacccgcctcctcagatcctcatcaaaaacacacctgtacctgcggatcctccaacggccttcaacaagggcaagctgaactctttcatcacccagtattctactggccaagtcagcgtggagatcgagtgggagctgcagaaggaaaacagcaagcgctggaacccggagatccagtacacttccaactattacaagtctaataatgttgaatttgctgttaatactgaaggtgtatatagtgaaccccgccccattggcaccagatacctgactcgtaatctg

SEQ ID NO: 798 - protein, 736 aa, synthetic construct
  REGION 1..736: note = Adeno Associated Virus Capsid Protein Variant
MAADGYLPDWLEDNLSEGIREWWALKPGAPQPKANQQHQDNARGLVLPGYKYLGPGNGLDKGEPVNAADAAALEHDKAYDQQLKAGDNPYLKYNHADAEFQERLKEDTSFGGNLGRAVFQAKKRLLEPLGLVEEAAKTAPGKKRPVEQSPQEPDSSAGIGKSGAQPAKKRLNFGQTGDTESVPDPQPIGEPPAAPSGVGSLTMASGGGAPVADNNEGADGVGSSSGNWHCDSQWLGDRVITTSTRTWALPTYNNHLYKQISNSTSGGSSNDNAYFGYSTPWGYFDFNRFHCHFSPRDWQRLINNNWGFRPKRLNFKLFNIQVKEVTDNNGVKTIANNLTSTVQVFTDSDYQLPYVLGSAHEGCLPPFPADVFMIPQYGYLTLNDGSQAVGRSSFYCLEYFPSQMLRTGNNFQFSYEFENVPFHSSYAHSQSLDRLMNPLIDQYLYYLSKTINGSGQGQQTLKFSVAGPSNMAVQGRNYIPGPSYRQQRVSTTVTFNNNSEFAWPGASSWALNGRNSLMNPGPAMASHKEGEDRFFPLSGSLIFGKQGTGRDNVDADKVCITNEEEIKTTNPVATESYGQVATNHQSARAQAQTGWVQNQGILPGMVWQDRDVYLQGPIWAKIPHTDGNFHPSPLMGGFGMKHPPPQILIKNTPVPADPPTAFNKGKLNSFITQYSTGQVSVEIEWELQKENSKRWNPEIQYTSNYYKSNNVEFAVNTEGVYSEPRPIGTRYLTRNL

SEQ ID NO: 799 - DNA, 2208 bp, synthetic construct
  misc_feature 1..2208: note = Adeno Associated Virus Capsid Protein Variant
  source 1..2208: mol_type = other DNA
atggctgccgatggttatcttccagattggctcgaggacaaccttagtgaaggaattcgcgagtggtgggctttgaaacctggagcccctcaacccaaggcaaatcaacaacatcaagacaacgctcgaggtcttgtgcttccgggttacaaataccttggacccggcaacggactcgacaagggggagccggtcaacgcagcagacgcggcggccctcgagcacgacaaggcctacgaccagcagctcaaggccggagacaacccgtacctcaagtacaaccacgccgacgccgagttccaggagcggctcaaagaagatacgtcttttgggggcaacctcgggcgagcagtcttccaggccaaaaagaggcttcttgaacctcttggtctggttgaggaagcggctaagacggctcctggaaagaagaggcctgtagagcagtctcctcaggaaccggactcctccgcgggtattggcaaatcgggtgcacagcccgctaaaaagagactcaatttcggtcagactggcgacacagagtcagtcccagaccctcaaccaatcggagatcctcccgcagccccctcaggtgtgggatctcttacaatggcttcaggtggtggcgcaccagtggcagacaataacgaaggtgccgatggagtgggtagttcctcgggaaattggcattgcgattcccaatggctgggggacagagtcatcaccaccagcacccgaacctgggccctgcccacctacaacaatcacctctacaagcaaatctccaacagcacatctggaggatcttcaaatgacaacgcctacttcggctacagcaccccctgggggtattttgacttcaacagattccactgccacttctcaccacgtgactggcagcgactcatcaacaacaactggggattccggcctaagcgactcaacttcaagctcttcaacattcaggtcaaagaggttacggacaacaatggagtcaagaccatcgccaataaccttaccagcacggtccaggtcttcacggactcagactatcagctcccgtacgtgctcgggtcggctcacgagggctgcctcccgccgttcccagcggacgttttcatgattcctcagtacgggtatctgacgcttaatgatggaagccaggccgtgggtcgttcgtccttttactgcctggaatatttcccgtcgcaaatgctaagaacgggtaacaacttccagttcagctacgagtttgagaacgtacctttccatagcagctacgctcacagccaaagcctggaccgactaatgaatccactcatcgaccaatacttgtactatctctcaaagactattaacggttctggacagggccaacaaacgctaaaattcagtgtggccggacccagcaacatggctgtccagggaagaaactacatacctggacccagctaccgacaacaacgtgtctcaaccactgtgacttttaacaacaacagcgaatttgcttggcctggagcttcttcttgggctctcaatggacgtaatagcttgatgaatcctggacctgctatggccagccacaaagaaggagaggaccgtttctttcctttgtctggatctttaatttttggcaaacaaggaactggaagagacaacgtggatgcggacaaagtcatgataaccaacgaagaagaaattaaaactactaacccggtagcaacggagtcctatggacaagtggccacaaaccaccagagtgcccgggcacaggcgcagaccggctgggttcaaaaccaaggaatacttccgggtatggtttggcaggacagagatgtgtacctgcaaggacccatttgggccaaaattcctcacacggacggcaactttcacccttctccgctgatgggagggtttggaatgaagcacccgcctcctcagatcctcatcaaaaacacacctgtacctgcggatcctccaacggccttcaacaagggcaagctgaactctttcatcacccagtattctactggccaagtcagcgtggagatcgagtgggagctgcagaaggaaaacagcaagcgctggaacccggagatccagtacacttccaactattacaagtctaataatgttgaatttgctgttaatactgaaggtgtatatagtgaaccccaccccattggcaccagatacctgactcgtaatctg

SEQ ID NO: 800 - protein, 736 aa, synthetic construct
  REGION 1..736: note = Adeno Associated Virus Capsid Protein Variant
MAADGYLPDWLEDNLSEGIREWWALKPGAPQPKANQQHQDNARGLVLPGYKYLGPGNGLDKGEPVNAADAAALEHDKAYDQQLKAGDNPYLKYNHADAEFQERLKEDTSFGGNLGRAVFQAKKRLLEPLGLVEEAAKTAPGKKRPVEQSPQEPDSSAGIGKSGAQPAKKRLNFGQTGDTESVPDPQPIGDPPAAPSGVGSLTMASGGGAPVADNNEGADGVGSSSGNWHCDSQWLGDRVITTSTRTWALPTYNNHLYKQISNSTSGGSSNDNAYFGYSTPWGYFDFNRFHCHFSPRDWQRLINNNWGFRPKRLNFKLFNIQVKEVTDNNGVKTIANNLTSTVQVFTDSDYQLPYVLGSAHEGCLPPFPADVFMIPQYGYLTLNDGSQAVGRSSFYCLEYFPSQMLRTGNNFQFSYEFENVPFHSSYAHSQSLDRLMNPLIDQYLYYLSKTINGSGQGQQTLKFSVAGPSNMAVQGRNYIPGPSYRQQRVSTTVTFNNNSEFAWPGASSWALNGRNSLMNPGPAMASHKEGEDRFFPLSGSLIFGKQGTGRDNVDADKVMITNEEEIKTTNPVATESYGQVATNHQSARAQAQTGWVQNQGILPGMVWQDRDVYLQGPIWAKIPHTDGNFHPSPLMGGFGMKHPPPQILIKNTPVPADPPTAFNKGKLNSFITQYSTGQVSVEIEWELQKENSKRWNPEIQYTSNYYKSNNVEFAVNTEGVYSEPHPIGTRYLTRNL

SEQ ID NO: 801 - DNA, 2208 bp, synthetic construct
  misc_feature 1..2208: note = Adeno Associated Virus Capsid Protein Variant
  source 1..2208: mol_type = other DNA
atggctgccgatggttatcttccagattggctcgaggacaaccttagtgaaggaattcgcgagtggtgggctttgaaacctggagcccctctacccaaggcaaatcaacaacatcaagacaacgctcgaggtcttgtgcttccgggttacaaataccttggacccggcaacggactcgacaagggggagccggtcaacgcagcagacgcggcggccctcgagcacgacaaggcctacgaccagcagctcaaggccggagacaacccgtacctcaagtacaaccacgccgacgccgagttccaggagcggctcaaagaagatacgtcttttgggggcaacctcgggcgagcagtcttccaggccaaaaagaggcttcttgaacctcttggtctggttgaggaagcggctaagacggctcctggaaagaagaggcctgtagagcagtctcctcaggaaccggactcctccgcgggtattggcaaatcgggtgcacagcccgctaaaaagagactcaatttcggtcagactggcgacacagagtcagtcccagaccctcaaccaatcggagaacctcccgcagccccctcaggtgtgggatctcttacaatggcttcaggtggtggcgcaccagtggcagacaataacgaaggtgccgatggagtgggtagttcctcgggaaattggcattgcgattcccaatggctgggggacagagtcatcaccaccagcacccgaacctgggccctgcccacctacaacaatcacctctacaagcaaatctccaacagcacatctggaggatcttcaaatgacaacgcctacttcggctacagcaccccctgggggtattttgacttcaacagattccactgccacttctcaccacgtgactggcagcgactcatcaacaacaactggggattccggcctaagcgactcaacttcaagctcttcaacattcaggtcaaagaggttacggacaacaatggagtcaagaccatcgccaataaccttaccagcacggtccaggtcttcacggactcagactatcagctcccgtacgtgctcgggtcggctcacgagggctgcctcccgccgttcccagcggacgttttcatgattcctcagtacgggtatctgacgcttaatgatggaagccaggccgtgggtcgttcgtccttttactgcctggaatatttcccgtcgcaaatgctaagaacgggtaacaacttccagttcagctacgagtttgagaacgtacctttccatagcagctacgctcacagccaaagcctggaccgactaatgaatccactcatcgaccaatacttgtactatctctcaaagactattaacggttctggacagggccaacaaacgctaaaattcagtgtggccggacccagcaacatggctgtccagggaagaaactacatacctggacccagctaccgacaacaacgtgtctcaaccactgtgacttttaacaacaacagcgaatttgcttggcctggagcttcttcttgggctctcaatggacgtaatagcttgatgaatcctggacctgctatggccagccacaaagaaggagaggaccgtttctttcctttgtctggatctttaatttttggcaaacaaggaactggaagagacaacgtggatgcggacaaagtcatgataaccaacgaagaagaaattaaaactactaacccggtagcaacggagtcctatggacaagtggccacaaaccaccagagtgcccgggcacaggcgcagaccggctgggttcaaaaccaaggaatacttccgggtatggtttggcaggacagagatgtgtacctgcaaggacccatttgggccaaaattcctcacacggacggcaactttcacccttctccgctgatgggagggtttggaatgaagcacccgcctcctcagatcctcatcaaaaacacacctgtacctgcggatcctccaacggccttcaacaagggcaagctgaactctttcatcacccagtattctactggccaagtcagcgtggagatcgagtgggagctgcagaaggaaaacagcaagcgctggaacccggagatccagtacacttccaactattacaagtctaataatgttgaatttgctgttaatactgaaggtgtatatagtgaaccccgccccattggcaccagatacctgactcgtaatctg

SEQ ID NO: 802 - protein, 736 aa, synthetic construct
  REGION 1..736: note = Adeno Associated Virus Capsid Protein Variant
MAADGYLPDWLEDNLSEGIREWWALKPGAPLPKANQQHQDNARGLVLPGYKYLGPGNGLDKGEPVNAADAAALEHDKAYDQQLKAGDNPYLKYNHADAEFQERLKEDTSFGGNLGRAVFQAKKRLLEPLGLVEEAAKTAPGKKRPVEQSPQEPDSSAGIGKSGAQPAKKRLNFGQTGDTESVPDPQPIGEPPAAPSGVGSLTMASGGGAPVADNNEGADGVGSSSGNWHCDSQWLGDRVITTSTRTWALPTYNNHLYKQISNSTSGGSSNDNAYFGYSTPWGYFDFNRFHCHFSPRDWQRLINNNWGFRPKRLNFKLFNIQVKEVTDNNGVKTIANNLTSTVQVFTDSDYQLPYVLGSAHEGCLPPFPADVFMIPQYGYLTLNDGSQAVGRSSFYCLEYFPSQMLRTGNNFQFSYEFENVPFHSSYAHSQSLDRLMNPLIDQYLYYLSKTINGSGQGQQTLKFSVAGPSNMAVQGRNYIPGPSYRQQRVSTTVTFNNNSEFAWPGASSWALNGRNSLMNPGPAMASHKEGEDRFFPLSGSLIFGKQGTGRDNVDADKVMITNEEEIKTTNPVATESYGQVATNHQSARAQAQTGWVQNQGILPGMVWQDRDVYLQGPIWAKIPHTDGNFHPSPLMGGFGMKHPPPQILIKNTPVPADPPTAFNKGKLNSFITQYSTGQVSVEIEWELQKENSKRWNPEIQYTSNYYKSNNVEFAVNTEGVYSEPRPIGTRYLTRNL

SEQ ID NO: 803 - DNA, 2208 bp, synthetic construct
  misc_feature 1..2208: note = Adeno Associated Virus Capsid Protein Variant
  source 1..2208: mol_type = other DNA
atggctgccgatggttatcttccagattggctcgaggacaaccttagtgaaggaattcgcgagtggtgggctttgaaacctggagcccctcaacccaaggcaaatcaacaacatcaagacaacgctcgaggtcttgtgcttccgggttacaaataccttggacccggcaacggactcgacaagggggagccggtcaacgcagcagacgcggcggccctcgagcacgacaaggcctacgaccagcagctcaaggccggagacaacccgtacctcaagtacaaccacgccgacgccgagttccaggagcggctcaaagaagatacgtcttttgggggcaacctcgggcgagcagtcttccaggccaaaaagaggcttcttgaacctcttggtctggttgaggaagcggctaagacggctcctggaaagaagaggcctgtagagcagtctcctcaggaaccggactcctccgcgggtattggcaaatcgggtgcacagcccgctaaaaagagactcaatttcggtcagactggcgacacagagtcagtcccagaccctcaaccaatcggagaacctcccgcagccccctcaggtgtgggatctcttacaatggcttcaggtggtggcgcaccagtggcagacaataacgaaggtgccgatggagtgggtagttcctcgggaaattggcattgcgattcccaatggctgggggacagagtcatcaccaccagcacccgaacctgggccctgcccacctacaacaatcacctctacaagcaaatctccaacagcacatctggaggatcttcaaatgacaacgcctacttcggctacagcaccccctgggggtattttgacttcaacagattccactgccacttctcaccacgtgactggcagcgactcatcaacaacaactggggattccggcctaagcgactcaacttcaagctcttcaacattcaggtcaaagaggttacggacaacaatggagtcaagatcatcgccaataaccttaccagcacggtccaggtcttcacggactcagactatcagctcccgtacgtgctcgggtcggctcacgagggctgcctcccgccgttcccagcggacgttttcatgattcctcagtacgggtatctgacgcttaatgatggaagccaggccgtgggtcgttcgtccttttactgcctggaatatttcccgtcgcaaatgctaagaacgggtaacaacttccagttcagctacgagtttgagaacgtacctttccatagcagctacgctcacagccaaagcctggaccgactaatgaatccactcatcgaccaatacttgtactatctctcaaagactattaacggttctggacagggccaacaaacgctaaaattcagtgtggccggacccagcaacatggctgtccagggaagaaactacatacctggacccagctaccgacaacaacgtgtctcaaccactgtgacttttaacaacaacagcgaatttgcttggcctggagcttcttcttgggctctcaatggacgtaatagcttgatgaatcctggacctgctatggccagccacaaagaaggagaggaccgtttctttcctttgtctggatctttaatttttggcaaacaaggaactggaagagacaacgtggatgcggacaaagtcatgataaccaacgaagaagaaattaaaactactaacccggtagcaacggagtcctatggacaagtggccacaaaccaccagagtgcccgggcacaggcgcagaccggctgggttcaaaaccaaggaatacttccgggtatggtttggcaggacagagatgtgtacctgcaaggacccatttgggccaaaattcctcacacggacggcaactttcacccttctccgctgatgggagggtttggaatgaagcacccgcctcctcagatcctcatcaaaaacacacctgtacctgcggatcctccaacggccttcaacaagggcaagctgaactctttcatcacccagtattctactggccaagtcagcgtggagatcgagtgggagctgcagaaggaaaacagcaagcgctggaacccggagatccagtacacttccaactattacaagtctaataatgttgaatttgctgttaatactgaaggtgtatatagtgaaccccgccccattggcaccagatacctgactcgtaatctg

SEQ ID NO: 804 - protein, 736 aa, synthetic construct
  REGION 1..736: note = Adeno Associated Virus Capsid Protein Variant
MAADGYLPDWLEDNLSEGIREWWALKPGAPQPKANQQHQDNARGLVLPGYKYLGPGNGLDKGEPVNAADAAALEHDKAYDQQLKAGDNPYLKYNHADAEFQERLKEDTSFGGNLGRAVFQAKKRLLEPLGLVEEAAKTAPGKKRPVEQSPQEPDSSAGIGKSGAQPAKKRLNFGQTGDTESVPDPQPIGEPPAAPSGVGSLTMASGGGAPVADNNEGADGVGSSSGNWHCDSQWLGDRVITTSTRTWALPTYNNHLYKQISNSTSGGSSNDNAYFGYSTPWGYFDFNRFHCHFSPRDWQRLINNNWGFRPKRLNFKLFNIQVKEVTDNNGVKIIANNLTSTVQVFTDSDYQLPYVLGSAHEGCLPPFPADVFMIPQYGYLTLNDGSQAVGRSSFYCLEYFPSQMLRTGNNFQFSYEFENVPFHSSYAHSQSLDRLMNPLIDQYLYYLSKTINGSGQGQQTLKFSVAGPSNMAVQGRNYIPGPSYRQQRVSTTVTFNNNSEFAWPGASSWALNGRNSLMNPGPAMASHKEGEDRFFPLSGSLIFGKQGTGRDNVDADKVMITNEEEIKTTNPVATESYGQVATNHQSARAQAQTGWVQNQGILPGMVWQDRDVYLQGPIWAKIPHTDGNFHPSPLMGGFGMKHPPPQILIKNTPVPADPPTAFNKGKLNSFITQYSTGQVSVEIEWELQKENSKRWNPEIQYTSNYYKSNNVEFAVNTEGVYSEPRPIGTRYLTRNL

SEQ ID NO: 805 - DNA, 2208 bp, synthetic construct
  misc_feature 1..2208: note = Adeno Associated Virus Capsid Protein Variant
  source 1..2208: mol_type = other DNA
atggctgccgatggttatcttccagattggctcgaggacaaccttagtgaaggaattcgcgagtggtgggctttgaaacctggagcccctcaacccaaggcaaatcaacaacatcaagacaacgctcgaggtcttgtgcttccgggttacaaataccttggacccggcaacggactcgacaagggggagccggtcaacgcagcagacgcggcggccctcgagcacgacaaggcctacgaccagcagctcaaggccggagacaacccgtacctcaagtacaaccacgccgacgccgagttccgagagcggctcaaagaagatacgtcttttgggggcaacctcgggcgagcagtcttccaggccaaaaagaggcttcttgaacctcttggtctggttgaggaagcggctaagacggctcctggaaagaagaggcctgtagagcagtctcctcaggaaccggactcctccgcgggtattggcaaatcgggtgcacagcccgctaaaaagagactcaatttcggtcagactggcgacacagagtcagtcccagaccctcaaccaatcggagaacctcccgcagccccctcaggtgtgggatctcttacaatggcttcaggtggtggcgcaccagtggcagacaataacgaaggtgccgatggagtgggtagttcctcgggaaattggcattgcgattcccaatggctgggggacagagtcatcaccaccagcacccgaacctgggccctgcccacctacaacaatcacctctacaagcaaatctccaacagcacatctggaggatcttcaaatgacaacgcctacttcggctacagcaccccctgggggtattttgacttcaacagattccactgccacttctcaccacgtgactggcagcgactcatcaacaacaactggggattccggcctaagcgactcaacttcaagctcttcaacattcaggtcaaagaggttacggacaacaatggagtcaagaccatcgccaataaccttaccagcacggtccaggtcttcacggactcagactatcagctcccgtacgtgctcgggtcggctcacgagggctgcctcccgccgttcccagcggacgttttcatgattcctcagtacgggtatctgacgcttaatgatggaagccaggccgtgggtcgttcgtccttttactgcctggaatatttcccgtcgcaaatgctaagaacgggtaacaacttccagttcagctacgagtttgagaacgtacctttccatagcagctacgctcacagccaaagcctggaccgactaatgaatccactcatcgaccaatacttgtactatctctcaaagactattaacggttctggacagggccaacaaacgctaaaattcagtgtggccggacccagcaacatggctgtccagggaagaaactacatacctggacccagctaccgacaacaacgtgtctcaaccactgtgacttttaacaacaacagcgaatttgcttggcctggagcttcttcttgggctctcaatggacgtaatagcttgatgaatcctggacctgctatggccagccacaaagaaggagaggaccgtttctttcctttgtctggatctttaatttttggcaaacaaggaactggaagagacaacgtggatgcggacaaagtcatgataaccaacgaagaagaaattaaaactactaacccggtagcaacggagtcctatggacaagtggccacaaaccaccagagtgcccgggcacaggcgcagaccggctgggttcaaaaccaaggaatacttccgggtatggtttggcaggacagagatgtgtacctgcaaggacccatttgggccaaaattcctcacacggacggcaactttcacccttctccgctgatgggagggtttggaatgaagcacccgcctcctcagatcctcatcaaaaacacacctgtacctgcggatcctccaacggccttcaacaagggcaagctgaactctttcatcacccagtattctactggccaagtcagcgtggagatcgagtgggagctgcagaaggaaaacagcaagcgctggaacccggagatccagtacacttccaactattacaagtctaataatgttgaatttgctgttaatactgaaggtgtatatagtgaaccccgccccattggcaccagatacctgactcgtaatctg

SEQ ID NO: 806 - protein, 736 aa, synthetic construct
  REGION 1..736: note = Adeno Associated Virus Capsid Protein Variant
MAADGYLPDWLEDNLSEGIREWWALKPGAPQPKANQQHQDNARGLVLPGYKYLGPGNGLDKGEPVNAADAAALEHDKAYDQQLKAGDNPYLKYNHADAEFRERLKEDTSFGGNLGRAVFQAKKRLLEPLGLVEEAAKTAPGKKRPVEQSPQEPDSSAGIGKSGAQPAKKRLNFGQTGDTESVPDPQPIGEPPAAPSGVGSLTMASGGGAPVADNNEGADGVGSSSGNWHCDSQWLGDRVITTSTRTWALPTYNNHLYKQISNSTSGGSSNDNAYFGYSTPWGYFDFNRFHCHFSPRDWQRLINNNWGFRPKRLNFKLFNIQVKEVTDNNGVKTIANNLTSTVQVFTDSDYQLPYVLGSAHEGCLPPFPADVFMIPQYGYLTLNDGSQAVGRSSFYCLEYFPSQMLRTGNNFQFSYEFENVPFHSSYAHSQSLDRLMNPLIDQYLYYLSKTINGSGQGQQTLKFSVAGPSNMAVQGRNYIPGPSYRQQRVSTTVTFNNNSEFAWPGASSWALNGRNSLMNPGPAMASHKEGEDRFFPLSGSLIFGKQGTGRDNVDADKVMITNEEEIKTTNPVATESYGQVATNHQSARAQAQTGWVQNQGILPGMVWQDRDVYLQGPIWAKIPHTDGNFHPSPLMGGFGMKHPPPQILIKNTPVPADPPTAFNKGKLNSFITQYSTGQVSVEIEWELQKENSKRWNPEIQYTSNYYKSNNVEFAVNTEGVYSEPRPIGTRYLTRNL

SEQ ID NO: 807 - DNA, 2208 bp, synthetic construct
  misc_feature 1..2208: note = Adeno Associated Virus Capsid Protein Variant
  source 1..2208: mol_type = other DNA
atggctgccgatggttatcttccagattggctcgaggacaaccttagtgaaggaattcgcgagtggtgggctttgaaacctggagcccctcaacccaaggcaaatcaacaacatcaagacaacgctcgaggtcttgtgcttccgggttacaaataccttggacccggcaacggactcgacaagggggagccggtcaacgcagcagacgcggcggccctcgagcacgacaaggcctacgaccagcagctcaaggccggagacaacccgtacctcaagtacaaccacgccgacgccgagttccaggagcggctcaaagaagatacgtcttttgggggcaacctcgggcgagcagtcttccaggccaaaaagaggcttcttgaacctcttggtctggttgaggaagcggctaagacggctcctggaaagaagaggcctgtagagcagtctcctcaggaaccggactcctccgcgggtattggcaaatcgggtgcacagcccgctaaaaagagactcaatttcggtcagactggcgacacagagtcagtcccagaccctcaaccaatcggagaacctcccgcagccccctcaggtgtgggatctcttacaatggcttcaggtggtggcgcaccagtggcagacaataacgaaggtgccgatggagtgggtagttcctcgggaaattggcattgcgattcccaatggctgggggacagagtcatcaccaccagcacccgaacctgggccctgcccacctacaacaatcacctctacaagcaaatctccaacagcacatctggaggatcttcaaatgacaacgcctacttcggctacagcaccccctgggggtattttgacttcaacagattccactgccacttctcaccacgtgactggcagcgactcatcaacaacaactggggattccggcctaagcgactcaacttcaagctcttcaacattcaggtcaaagaggttacggacaacaatggagtcaagaccatcgccaataaccttaccagcacggtccaggtcttcacggactcagactatcagctcccgtacgtgctcgggtcggctcacgagggctgcctcccgccgttcccagcggacgttttcatgattcctcagtacgggtatctgacgcttaatgatggaagccaggccgtgggtcgttcgtccttttactgcctggaatatttcccgtcgcaaatgctaagaacgggtaacaacttccagttcagctacgagtttgagaacgtacctttccatagcagctacgctcacagccaaagcctggaccgactaatgaatccactcatcgaccaatacttgtactatctctcaaagactattaacggttctggacagggccaacaaacgctaaaattcagtgtggccggacccagcaacatggctgtccagggaagaaactacatacctggacccagctaccgacaacaacgtgtctcaaccactgtgacttttaacaacaacagcgaatttgcttggcctggagcttcttcttgggctctcaatggacgtaatagcttgatgaatcctggacctgctatggccagccacaaagaaggagaggaccgtttctttcctttgtctggatctttaatttttggcaaacaaggaactggaagagacaacgtggatgcggacaaagtcatgataaccaacgaagaagaaattaaaactactaacccggtagcaacggattcctatggacaagtggccacaaaccaccagagtgcccgggcacaggcgcagaccggctgggttcaaaaccaaggaatacttccgggtatggtttggcaggacagagatgtgtacctgcaaggacccatttgggccaaaattcctcacacggacggcaactttcacccttctccgctgatgggagggtttggaatgaagcacccgcctcctcagatcctcatcaaaaacacacctgtacctgcggatcctccaacggccttcaacaagggcaagctgaactctttcatcacccagtattctactggccaagtcagcgtggagatcgagtgggagctgcagaaggaaaacagcaagcgctggaacccggagatccagtacacttccaactattacaagtctaataatgttgaatttgctgttaatactgaaggtgtatatagtgaaccccgccccattggcaccagatacctgactcgtaatctg

SEQ ID NO: 808 - protein, 736 aa, synthetic construct
  REGION 1..736: note = Adeno Associated Virus Capsid Protein Variant
MAADGYLPDWLEDNLSEGIREWWALKPGAPQPKANQQHQDNARGLVLPGYKYLGPGNGLDKGEPVNAADAAALEHDKAYDQQLKAGDNPYLKYNHADAEFQERLKEDTSFGGNLGRAVFQAKKRLLEPLGLVEEAAKTAPGKKRPVEQSPQEPDSSAGIGKSGAQPAKKRLNFGQTGDTESVPDPQPIGEPPAAPSGVGSLTMASGGGAPVADNNEGADGVGSSSGNWHCDSQWLGDRVITTSTRTWALPTYNNHLYKQISNSTSGGSSNDNAYFGYSTPWGYFDFNRFHCHFSPRDWQRLINNNWGFRPKRLNFKLFNIQVKEVTDNNGVKTIANNLTSTVQVFTDSDYQLPYVLGSAHEGCLPPFPADVFMIPQYGYLTLNDGSQAVGRSSFYCLEYFPSQMLRTGNNFQFSYEFENVPFHSSYAHSQSLDRLMNPLIDQYLYYLSKTINGSGQGQQTLKFSVAGPSNMAVQGRNYIPGPSYRQQRVSTTVTFNNNSEFAWPGASSWALNGRNSLMNPGPAMASHKEGEDRFFPLSGSLIFGKQGTGRDNVDADKVMITNEEEIKTTNPVATDSYGQVATNHQSARAQAQTGWVQNQGILPGMVWQDRDVYLQGPIWAKIPHTDGNFHPSPLMGGFGMKHPPPQILIKNTPVPADPPTAFNKGKLNSFITQYSTGQVSVEIEWELQKENSKRWNPEIQYTSNYYKSNNVEFAVNTEGVYSEPRPIGTRYLTRNL

SEQ ID NO: 809 - DNA, 2208 bp, synthetic construct
  misc_feature 1..2208: note = Adeno Associated Virus Capsid Protein Variant
  source 1..2208: mol_type = other DNA
atggctgccgatggttatcttccagattggctcgaggacaaccttagtgaaggaattcgcgagtggtgggctttgaaacctggagcccctcaacccaaggcaaatcaacaacatcaagacaacgctcgaggtcttgtgcttccgggttacaaataccttggacccggcaacggactcgacaagggggagccggtcaacgcagcagacgcggcggccctcgagcacgacaaggcctacgaccagcagctcaaggccggagacaacccgtacctcaagtacaaccacgccgacgccgagttccaggagcggctcaaagaagatacgtcttttgggggcaacctcgggcgagcagtcttccaggccaaaaagaggcttcttgaacctcttggtctggttgaggaagcggctaagacggctcctggaaagaagaggcctgtagagcagtctcctcaggaaccggactcctccgcgggtattggcaaatcgggtgcacagcccgctaaaaagagactcaatttcggtcagactggcgacacagagtcagtcccagaccctcaaccaatcggagaacctcccgcagccccctcaggtgtgggatctcttacaatggcttcaggtggtggcgcaccagtggcagacaataacgaaggtgccgatggagtgggtagttcctcgggaaattggcattgcgattcccaatggctgggggacagagtcatcaccaccagcacccgaacctgggccctgcccacctacaacaatcacctctacaagcaaatctccaacagcacatctggaggatcttcaaatgacaacgcctacttcggctacagcaccccctgggggtattttgacttcaacagattccactgccacttctcaccacgtgactggcagcgactcatcaacaacaactggggattccggcctaagcgactcaacttcaagctcttcaacattcaggtcaaagaggttacggacaacaatggagtcaagaccatcgccaataaccttaccagcacggtccaggtcttcacggactcagactatcagctcccgtacgtgctcgggtcggctcacgagggctgcctcccgccgttcccagcggacgttttcatgattcctcagtacgggtatctgacgcttaatgatggaagccaggccgtgggtcgttcgtccttttactgcctggaatatttcccgtcgcaaatgctaagaacgggtaacaacttccagttcagctacgagtttgagaacgtacctttccatagcagctacgctcacagccaaagcctggaccgactaatgaatccactcatcgaccaatacttgtactatctctcaaagactattaacggttctggacagggccaacaaacgctaaaattcagtccagccggacccagcaacatggctgtccagggaagaaactacatacctggacccagctaccgacaacaacgtgtctcaaccactgtgacttttaacaacaacagcgaatttgcttggcctggagcttcttcttgggctctcaatggacgtaatagcttgatgaatcctggacctgctatggccagccacaaagaaggagaggaccgtttctttcctttgtctggatctttaatttttggcaaacaaggaactggaagagacaacgtggatgcggacaaagtcatgataaccaacgaagaagaaattaaaactactaacccggtagcaacggagtcctatggacaagtggccacaaaccaccagagtgcccgggcacaggcgcagaccggctgggttcaaaaccaaggaatacttccgggtatggtttggcaggacagagatgtgtacctgcaaggacccatttgggccaaaattcctcacacggacggcaactttcacccttctccgctgatgggagggtttggaatgaagcacccgcctcctcagatcctcatcaaaaacacacctgtacctgcggatcctccaacggccttcaacaagggcaagctgaactctttcatcacccagtattctactggccaagtcagcgtggagatcgagtgggagctgcagaaggaaaacagcaagcgctggaacccggagatccagtacacttccaactattacaagtctaataatgttgaatttgctgttaatactgaaggtgtatatagtgaaccccgccccattggcaccagatacctgactcgtaatctg

SEQ ID NO: 810 - protein, 736 aa, synthetic construct
  REGION 1..736: note = Adeno Associated Virus Capsid Protein Variant
MAADGYLPDWLEDNLSEGIREWWALKPGAPQPKANQQHQDNARGLVLPGYKYLGPGNGLDKGEPVNAADAAALEHDKAYDQQLKAGDNPYLKYNHADAEFQERLKEDTSFGGNLGRAVFQAKKRLLEPLGLVEEAAKTAPGKKRPVEQSPQEPDSSAGIGKSGAQPAKKRLNFGQTGDTESVPDPQPIGEPPAAPSGVGSLTMASGGGAPVADNNEGADGVGSSSGNWHCDSQWLGDRVITTSTRTWALPTYNNHLYKQISNSTSGGSSNDNAYFGYSTPWGYFDFNRFHCHFSPRDWQRLINNNWGFRPKRLNFKLFNIQVKEVTDNNGVKTIANNLTSTVQVFTDSDYQLPYVLGSAHEGCLPPFPADVFMIPQYGYLTLNDGSQAVGRSSFYCLEYFPSQMLRTGNNFQFSYEFENVPFHSSYAHSQSLDRLMNPLIDQYLYYLSKTINGSGQGQQTLKFSPAGPSNMAVQGRNYIPGPSYRQQRVSTTVTFNNNSEFAWPGASSWALNGRNSLMNPGPAMASHKEGEDRFFPLSGSLIFGKQGTGRDNVDADKVMITNEEEIKTTNPVATESYGQVATNHQSARAQAQTGWVQNQGILPGMVWQDRDVYLQGPIWAKIPHTDGNFHPSPLMGGFGMKHPPPQILIKNTPVPADPPTAFNKGKLNSFITQYSTGQVSVEIEWELQKENSKRWNPEIQYTSNYYKSNNVEFAVNTEGVYSEPRPIGTRYLTRNL

SEQ ID NO: 811 - DNA, 2208 bp, synthetic construct
  misc_feature 1..2208: note = Adeno Associated Virus Capsid Protein Variant
  source 1..2208: mol_type = other DNA
atggctgccgatggttatcttccagattggctcgaggacaaccttagtgaaggaattcgcgagtggtgggctttgaaacctggagcccctcaacccaaggcaaatcaacaacatcaagacaacgctcgaggtcttgtgcttccgggttacaaataccttggacccggcaacggactcgacaagggggagccggtcaacgcagcagacgcggcggccctcgagcacgacaaggcctacgaccagcagctcaaggccggagacaacccgtacctcaagtacaaccacgccgacgccgagttccaggagcggctcaaagaagatacgtcttttgggggcaacctcgggcgagcagtcttccaggccaaaaagaggcttcttgaacctcttggtctggttgaggaagcggctaagacggctcctggaaagaagaggcctgtagagcagtctcctcaggaaccggactcctccgcgggtattggcaaatcgggtgcacagcccgctaaaaagagactcaatttcggtcagactggcgacacagagtcagtcccagaccctcaaccaatcggagaacctcccgcagccccctcaggtgtgggatctcttacaatggcttcaggtggtggcgcaccagtggcagacaataacgaaggtgccgatggagtgggtagttcctcgggaaattggcattgcgattcccaatggctgggggacagagtcatcaccaccagcacccgaacctgggccctgcccacctacaacaatcacctctacaagcaaatctccaacagcacatctggaggatcttcaaatgacaacgcctacttcggctacagcaccccctgggggtattttgacttcaacagattccactgccacttctcaccacgtgactggcagcgactcatcaacaacaactggggattccggcctaagcgactcaacttcaagctcttcaacattcaggtcaaagaggttacggacaacaatggagtcaagaccatcgccaataaccttaccagcacggtccaggtcttcacggactcagactatcagctcccgtacgtgctcgggtcggctcacgagggctgcctcccgccgttcccagcggacgttttcatgattcctcagtacgggtatctgacgcttaatgatggaagccaggccgtgggtcgttcgtccttttactgcctggaatatttcccgtcgcaaatgctaagaacgggtaacaacttccagttcagctacgagtttgagaacgtacctttccatagcagctacgctcacagccaaagcctggaccgactaatgaatccactcatcgaccaatacttgtactatctctcaaagactattaacggttctggacagggccaacaaacgctaaaattcagtatagccggacccagcaacatggctgtccagggaagaaactacatacctggacccagctaccgacaacaacgtgtctcaaccactgtgacttttaacaacaacagcgaatttgcttggcctggagcttcttcttgggctctcaatggacgtaatagcttgatgaatcctggacctgctatggccagccacaaagaaggagaggaccgtttctttcctttgtctggatctttaatttttggcaaacaaggaactggaagagacaacgtggatgcggacaaagtcatgataaccaacgaagaagaaattaaaactactaacccggtagcaacggagtcctatggacaagtggccacaaaccaccagagtgcccgggcacaggcgcagaccggctgggttcaaaaccaaggaatacttccgggtatggtttggcaggacagagatgtgtacctgcaaggacccatttgggccaaaattcctcacacggacggcaactttcacccttctccgctgatgggagggtttggaatgaagcacccgcctcctcagatcctcatcaaaaacacacctgtacctgcggatcctccaacggccttcaacaagggcaagctgaactctttcatcacccagtattctactggccaagtcagcgtggagatcgagtgggagctgcagaaggaaaacagcaagcgctggaacccggagatccagtacacttccaactattacaagtctaataatgttgaatttgctgttaatactgaaggtgtatatagtgaaccccgccccattggcaccagatacctgactcgtaatctg

SEQ ID NO: 812 - protein, 736 aa, synthetic construct
  REGION 1..736: note = Adeno Associated Virus Capsid Protein Variant
MAADGYLPDWLEDNLSEGIREWWALKPGAPQPKANQQHQDNARGLVLPGYKYLGPGNGLDKGEPVNAADAAALEHDKAYDQQLKAGDNPYLKYNHADAEFQERLKEDTSFGGNLGRAVFQAKKRLLEPLGLVEEAAKTAPGKKRPVEQSPQEPDSSAGIGKSGAQPAKKRLNFGQTGDTESVPDPQPIGEPPAAPSGVGSLTMASGGGAPVADNNEGADGVGSSSGNWHCDSQWLGDRVITTSTRTWALPTYNNHLYKQISNSTSGGSSNDNAYFGYSTPWGYFDFNRFHCHFSPRDWQRLINNNWGFRPKRLNFKLFNIQVKEVTDNNGVKTIANNLTSTVQVFTDSDYQLPYVLGSAHEGCLPPFPADVFMIPQYGYLTLNDGSQAVGRSSFYCLEYFPSQMLRTGNNFQFSYEFENVPFHSSYAHSQSLDRLMNPLIDQYLYYLSKTINGSGQGQQTLKFSIAGPSNMAVQGRNYIPGPSYRQQRVSTTVTFNNNSEFAWPGASSWALNGRNSLMNPGPAMASHKEGEDRFFPLSGSLIFGKQGTGRDNVDADKVMITNEEEIKTTNPVATESYGQVATNHQSARAQAQTGWVQNQGILPGMVWQDRDVYLQGPIWAKIPHTDGNFHPSPLMGGFGMKHPPPQILIKNTPVPADPPTAFNKGKLNSFITQYSTGQVSVEIEWELQKENSKRWNPEIQYTSNYYKSNNVEFAVNTEGVYSEPRPIGTRYLTRNL

SEQ ID NO: 813 - DNA, 2208 bp, synthetic construct
  misc_feature 1..2208: note = Adeno Associated Virus Capsid Protein Variant
  source 1..2208: mol_type = other DNA
atggctgccgatggttatcttccagattggctcgaggacaaccttagtgaaggaattcgcgagtggtgggctttgaaacctggagcccctcaacccaaggcaaatcaacaacatcaagacaacgctcgaggtcttgtgcttccgggttacaaataccttggacccggcaacggactcgacaagggggagccggtcaacgcagcagacgcggcggccctcgagcacgacaaggcctacgaccagcagctcaaggccggagacaacccgtacctcaagtacaaccacgccgacgccgagttccaggagcggctcaaagaagatacgtcttttgggggcaacctcgggcgagcagtcttccaggccaaaaagaggcttcttgaacctcttggtctggttgaggaagcggctaagacggctcctggaaagaagaggcctgtagagcagtctcctcaggaaccggactcctccgcgggtattggcaaatcgggtgcacagcccgctaaaaagagactcaatttcggtcagactggcgacacagagtcagtcccagaccctcaaccaatcggagaacctcccgcagccccctcaggtgtgggatctcttacaatggcttcaggtggtggcgcaccagtggcagacaataacgaaggtgccgatggagtgggtagttcctcgggaaattggcattgcgattcccaatggctgggggacagagtcatcaccaccagcacccgaacctgggccctgcccacctacaacaatcacctctacactcaaatctccaacagcacatctggaggatcttcaaatgacaacgcctacttcggctacagcaccccctgggggtattttgacttcaacagattccactgccacttctcaccacgtgactggcagcgactcatcaacaacaactggggattccggcctaagcgactcaacttcaagctcttcaacattcaggtcaaagaggttacggacaacaatggagtcaagaccatcgccaataaccttaccagcacggtccaggtcttcacggactcagactatcagctcccgtacgtgctcgggtcggctcacgagggctgcctcccgccgttcccagcggacgttttcatgattcctcagtacgggtatctgacgcttaatgatggaagccaggccgtgggtcgttcgtccttttactgcctggaatatttcccgtcgcaaatgctaagaacgggtaacaacttccagttcagctacgagtttgagaacgtacctttccatagcagctacgctcacagccaaagcctggaccgactaatgaatccactcatcgaccaatacttgtactatctctcaaagactattaacggttctggacagggccaacaaacgctaaaattcagtgtggccggacccagcaacatggctgtccagggaagaaactacatacctggacccagctaccgacaacaacgtgtctcaaccactgtgacttttaacaacaacagcgaatttgcttggcctggagcttcttcttgggctctcaatggacgtaatagcttgatgaatcctggacctgctatggccagccacaaagaaggagaggaccgtttctttcctttgtctggatctttaatttttggcaaacaaggaactggaagagacaacgtggatgcggacaaagtcatgataaccaacgaagaagaaattaaaactactaacccggtagcaacggagtcctatggacaagtggccacaaaccaccagagtgcccgggcacaggcgcagaccggctgggttcaaaaccaaggaatacttccgggtatggtttggcaggacagagatgtgtacctgcaaggacccatttgggccaaaattcctcacacggacggcaactttcacccttctccgctgatgggagggtttggaatgaagcacccgcctcctcagatcctcatcaaaaacacacctgtacctgcggatcctccaacggccttcaacaagggcaagctgaactctttcatcacccagtattctactggccaagtcagcgtggagatcgagtgggagctgcagaaggaaaacagcaagcgctggaacccggagatccagtacacttccaactattacaagtctaataatgttgaatttgctgttaatactgaaggtgtatatagtgaaccccgccccattggcaccagatacctgactcgtaatctg

SEQ ID NO: 814 - protein, 736 aa, synthetic construct
  REGION 1..736: note = Adeno Associated Virus Capsid Protein Variant
MAADGYLPDWLEDNLSEGIREWWALKPGAPQPKANQQHQDNARGLVLPGYKYLGPGNGLDKGEPVNAADAAALEHDKAYDQQLKAGDNPYLKYNHADAEFQERLKEDTSFGGNLGRAVFQAKKRLLEPLGLVEEAAKTAPGKKRPVEQSPQEPDSSAGIGKSGAQPAKKRLNFGQTGDTESVPDPQPIGEPPAAPSGVGSLTMASGGGAPVADNNEGADGVGSSSGNWHCDSQWLGDRVITTSTRTWALPTYNNHLYTQISNSTSGGSSNDNAYFGYSTPWGYFDFNRFHCHFSPRDWQRLINNNWGFRPKRLNFKLFNIQVKEVTDNNGVKTIANNLTSTVQVFTDSDYQLPYVLGSAHEGCLPPFPADVFMIPQYGYLTLNDGSQAVGRSSFYCLEYFPSQMLRTGNNFQFSYEFENVPFHSSYAHSQSLDRLMNPLIDQYLYYLSKTINGSGQGQQTLKFSVAGPSNMAVQGRNYIPGPSYRQQRVSTTVTFNNNSEFAWPGASSWALNGRNSLMNPGPAMASHKEGEDRFFPLSGSLIFGKQGTGRDNVDADKVMITNEEEIKTTNPVATESYGQVATNHQSARAQAQTGWVQNQGILPGMVWQDRDVYLQGPIWAKIPHTDGNFHPSPLMGGFGMKHPPPQILIKNTPVPADPPTAFNKGKLNSFITQYSTGQVSVEIEWELQKENSKRWNPEIQYTSNYYKSNNVEFAVNTEGVYSEPRPIGTRYLTRNL

SEQ ID NO: 815 - DNA, 2208 bp, synthetic construct
  misc_feature 1..2208: note = Adeno Associated Virus Capsid Protein Variant
  source 1..2208: mol_type = other DNA
atggctgccgatggttatcttccagattggctcgaggacaaccttagtgaaggaattcgcgagtggtgggctttgaaacctggagcccctcaacccaaggcaaatcaacaacatcaagacaacgctcgaggtcttgtgcttccgggttacaaataccttggacccggcaacggactcgacaagggggagccggtcaacgcagcagacgcggcggccctcgagcacgacaaggcctacgaccagcagctcaaggccggagacaacccgtacctcaagtacaaccacgccgacgccgagttccaggagcggctcaaagaagatacgtcttttgggggcaacctcgggcgagcagtcttccaggccaaaaagaggcttcttgaacctcttggtctggttgaggaagcggctaagacggctcctggaaagaagaggcctgtagagcagtctcctcaggaaccggactcctccgcgggtattggcaaatcgggtgcacagcccgctaaaaagagactcaatttcggtcagactggcgacacagagtcagtcccagaccctcaaccaatcggagaacctcccgcagccccctcaggtgtgggatctcttacaatggcttcaggtggtggcgcaccagtggcagacaataacgaaggtgccgatggagtgggtagttcctcgggaaattggcattgcgattcccaatggctgggggacagagtcatcaccaccagcacccgaacctgggccctgcccacctacaacaatcacctctacaagcaaatctccaacagcacatctggaggaatctcaaatgacaacgcctacttcggctacagcaccccctgggggtattttgacttcaacagattccactgccacttctcaccacgtgactggcagcgactcatcaacaacaactggggattccggcctaagcgactcaacttcaagctcttcaacattcaggtcaaagaggttacggacaacaatggagtcaagaccatcgccaataaccttaccagcacggtccaggtcttcacggactcagactatcagctcccgtacgtgctcgggtcggctcacgagggctgcctcccgccgttcccagcggacgttttcatgattcctcagtacgggtatctgacgcttaatgatggaagccaggccgtgggtcgttcgtccttttactgcctggaatatttcccgtcgcaaatgctaagaacgggtaacaacttccagttcagctacgagtttgagaacgtacctttccatagcagctacgctcacagccaaagcctggaccgactaatgaatccactcatcgaccaatacttgtactatctctcaaagactattaacggttctggacagggccaacaaacgctaaaattcagtgtggccggacccagcaacatggctgtccagggaagaaactacatacctggacccagctaccgacaacaacgtgtctcaaccactgtgacttttaacaacaacagcgaatttgcttggcctggagcttcttcttgggctctcaatggacgtaatagcttgatgaatcctggacctgctatggccagccacaaagaaggagaggaccgtttctttcctttgtctggatctttaatttttggcaaacaaggaactggaagagacaacgtggatgcggacaaagtcatgataaccaacgaagaagaaattaaaactactaacccggtagcaacggagtcctatggacaagtggccacaaaccaccagagtgcccgggcacaggcgcagaccggctgggttcaaaaccaaggaatacttccgggtatggtttggcaggacagagatgtgtacctgcaaggacccatttgggccaaaattcctcacacggacggcaactttcacccttctccgctgatgggagggtttggaatgaagcacccgcctcctcagatcctcatcaaaaacacacctgtacctgcggatcctccaacggccttcaacaagggcaagctgaactctttcatcacccagtattctactggccaagtcagcgtggagatcgagtgggagctgcagaaggaaaacagcaagcgctggaacccggagatccagtacacttccaactattacaagtctaataatgttgaatttgctgttaatactgaaggtgtatatagtgaaccccgccccattggcaccagatacctgactcgtaatctg

SEQ ID NO: 816 - protein, 736 aa, synthetic construct
  REGION 1..736: note = Adeno Associated Virus Capsid Protein Variant
MAADGYLPDWLEDNLSEGIREWWALKPGAPQPKANQQHQDNARGLVLPGYKYLGPGNGLDKGEPVNAADAAALEHDKAYDQQLKAGDNPYLKYNHADAEFQERLKEDTSFGGNLGRAVFQAKKRLLEPLGLVEEAAKTAPGKKRPVEQSPQEPDSSAGIGKSGAQPAKKRLNFGQTGDTESVPDPQPIGEPPAAPSGVGSLTMASGGGAPVADNNEGADGVGSSSGNWHCDSQWLGDRVITTSTRTWALPTYNNHLYKQISNSTSGGISNDNAYFGYSTPWGYFDFNRFHCHFSPRDWQRLINNNWGFRPKRLNFKLFNIQVKEVTDNNGVKTIANNLTSTVQVFTDSDYQLPYVLGSAHEGCLPPFPADVFMIPQYGYLTLNDGSQAVGRSSFYCLEYFPSQMLRTGNNFQFSYEFENVPFHSSYAHSQSLDRLMNPLIDQYLYYLSKTINGSGQGQQTLKFSVAGPSNMAVQGRNYIPGPSYRQQRVSTTVTFNNNSEFAWPGASSWALNGRNSLMNPGPAMASHKEGEDRFFPLSGSLIFGKQGTGRDNVDADKVMITNEEEIKTTNPVATESYGQVATNHQSARAQAQTGWVQNQGILPGMVWQDRDVYLQGPIWAKIPHTDGNFHPSPLMGGFGMKHPPPQILIKNTPVPADPPTAFNKGKLNSFITQYSTGQVSVEIEWELQKENSKRWNPEIQYTSNYYKSNNVEFAVNTEGVYSEPRPIGTRYLTRNL

SEQ ID NO: 817 - DNA, 2208 bp, synthetic construct
  misc_feature 1..2208: note = Adeno Associated Virus Capsid Protein Variant
  source 1..2208: mol_type = other DNA
atggctgccgatggttatcttccagattggctcgaggacaaccttagtgaaggaattcgcgagtggtgggctttgaaacctggagcccctcaacccaaggcaaatcaacaacatcaagacaacgctcgaggtcttgtgcttccgggttacaaataccttggacccggcaacggactcgacaagggggagccggtcaacgcagcagacgcggcggccctcgagcacgacaaggcctacgaccagcagctcaaggccggagacaacccgtacctcaagtacaaccacgccgacgccgagttccaggagcggctcaaagaagatacgtcttttgggggcaacctcgggcgagcagtcttccaggccaaaaagaggcttcttgaacctcttggtctggttgaggaagcggctaagacggctcctggaaagaagaggcctgtagagcagtctcctcaggaaccggactcctccgcgggtattggcaaatcgggtgcacagcccgctaaaaagagactcaatttcggtcagactggcgacacagagtcagtcccagaccctcaaccaatcggagaacctcccgcagccccctcaggtgtgggatctcttacaatggcttcaggtggtggcgcaccagtggcagacgataacgaaggtgccgatggagtgggtagttcctcgggaaattggcattgcgattcccaatggctgggggacagagtcatcaccaccagcacccgaacctgggccctgcccacctacaacaatcacctctacaagcaaatctccaacagcacatctggaggatcttcaaatgacaacgcctacttcggctatagcaccccctgggggtattttgacttcaacagattccactgccacttctcaccacgtgactggcagcgactcatcaacaacaactggggattccggcctaagcgactcaacttcaagctcttcaacattcaggtcaaagaggttacggacaacaatggagtcaagaccatcgccaataaccttaccagcacggtccaggtcttcacggactcagactatcagctcccgtacgtgctcgggtcggctcacgagggctgcctcccgccgttcccagcggacgttttcatgattcctcagtacgggtatctgacgcttaatgatggaagccaggccgtgggtcgttcgtccttttactgcctggaatatttcccgtcgcaaatgctaagaacgggtaacaacttccagttcagctacgagtttgagaacgtacctttccatagcagctacgctcacagccaaagcctggaccgactaatgaatccactcatcgaccaatacttgtactatctctcaaagactcttaacggttctggacagggccaacaaacgctaaaattcagtgtggccggacccagcaacatggctgtccagggaagaaactacatacctggacccagctaccgacaacaacgtgtctcaaccactgtgacttttaacaacaacagcgaatttgcttggcctggagcttcttcttgggctctcaatggacgtaatagcttgatgaatcctggacctgctatggccagccacaaagaaggagaggaccgtttctttcctttgtctggatctttaatttttggcaaacaaggaactggaagagacaacgtggatgcggacaaagtcatgataaccaacgaagaagaaattaaaactactaacccggtagcaacggagtcctatggacaagtggccacaaaccaccagagtgcccgggcacaggcgcagaccggctgggttcaaaaccaaggaatacttccgggtatggtttggcaggacagagatgtgtacctgcaaggacccatttgggccaaaattcctcacacggacggcaactttcacccttctccgctgatgggagggtttggaatgaagcacccgcctcctcagatcctcatcaaaaacacacctgtacctgcggatcctccaacggccttcaacaagggcaagctgaactctttcatcacccagtattctactggccaagtcagcgtggagatcgagtgggagctgcagaaggaaaacagcaagcgctggaacccggagatccagtacacttccaactattacaagtctaataatgttgaatttgctgttaatactgaaggtgtatatagtgaaccccgccccattggcaccagatacctgactcgtaatctg

SEQ ID NO: 818 - protein, 736 aa, synthetic construct
  REGION 1..736: note = Adeno Associated Virus Capsid Protein Variant
MAADGYLPDWLEDNLSEGIREWWALKPGAPQPKANQQHQDNARGLVLPGYKYLGPGNGLDKGEPVNAADAAALEHDKAYDQQLKAGDNPYLKYNHADAEFQERLKEDTSFGGNLGRAVFQAKKRLLEPLGLVEEAAKTAPGKKRPVEQSPQEPDSSAGIGKSGAQPAKKRLNFGQTGDTESVPDPQPIGEPPAAPSGVGSLTMASGGGAPVADDNEGADGVGSSSGNWHCDSQWLGDRVITTSTRTWALPTYNNHLYKQISNSTSGGSSNDNAYFGYSTPWGYFDFNRFHCHFSPRDWQRLINNNWGFRPKRLNFKLFNIQVKEVTDNNGVKTIANNLTSTVQVFTDSDYQLPYVLGSAHEGCLPPFPADVFMIPQYGYLTLNDGSQAVGRSSFYCLEYFPSQMLRTGNNFQFSYEFENVPFHSSYAHSQSLDRLMNPLIDQYLYYLSKTLNGSGQGQQTLKFSVAGPSNMAVQGRNYIPGPSYRQQRVSTTVTFNNNSEFAWPGASSWALNGRNSLMNPGPAMASHKEGEDRFFPLSGSLIFGKQGTGRDNVDADKVMITNEEEIKTTNPVATESYGQVATNHQSARAQAQTGWVQNQGILPGMVWQDRDVYLQGPIWAKIPHTDGNFHPSPLMGGFGMKHPPPQILIKNTPVPADPPTAFNKGKLNSFITQYSTGQVSVEIEWELQKENSKRWNPEIQYTSNYYKSNNVEFAVNTEGVYSEPRPIGTRYLTRNL

SEQ ID NO: 819 - DNA, 2208 bp, synthetic construct
  misc_feature 1..2208: note = Adeno Associated Virus Capsid Protein Variant
  source 1..2208: mol_type = other DNA
atggctgccgatggttatcttccagattggctcgaggacaaccttagtgaaggaattcgcgagtggtgggctttgaaacctggagcccctcaacccaaggcaaatcaacaacatcaagacaacgctcgaggtcttgtgcttccgggttacaaataccttggacccggcaacggactcgacaagggggagccggtcaacgcagcagacgcggcggccctcgagcacgacaaggcctacgaccagcagctcaaggccggagacaacccgtacctcaagtacaaccacgccgacgccgagttccaggagcggctcaaagaagatacgtcttttgggggcaacctcgggcgagcagtcttccaggccaaaaagaggcttcttgaacctcttggtctggttgaggaagcggctaagacggctcctggaaagaagaggcctgtagagcagtctcctcaggaaccggactcctccgcgggtattggcaaatcgggtgcacagcccgctaaaaagagactcaatttcggtcagactggcgacacagagtcagtcccagaccctcaaccaatcggagaacctcccgcagccccctcaggtgtgggatctcttacaatggcttcaggtggtggcgcaccagtggcagacaataacgaaggtgccgatggagtgggtagttcctcgggaaattggcattgcgattcccaatggctgggggacagagtcatcaccaccagcacccgaacctgggccctgcccacctacaacaatcacctctacaagcaaatctccaacagcacatctggaggatcttcaaatgacaacgcctacttcggctacagcaccccctgggggtattttgacttcaacagattccactgccacttctcaccacgtgactggcagcgactcatcaacaacaactggggattccggcctaagcgactcaacttcaagctcttcaacattcaggtcaaagaggttacggacaacaatggagtcaagaccatcgccaataaccttaccagcacggtccaggtcttcacggactcagactatcagctcccgtacgtgctcgggtcggctcacgagggctgcctcccgccgttcccagcggacgttttcatgattcctcagtacgggtatctgacgcttaatgatggaagccaggccgtgggtcgttcgtccttttactgcctggaatatttcccgtcgcaaatgctaagaacgggtaacaacttccagttcagctacgagtttgagaacgtacctttccatagcagctacgctcacagccaaagcctggaccgactaatgaatccactcatcgaccaatacttgtactatctctcaaagactattaacggttctggacagggccaacaaacgctaaaattcagtgtggccggacccagcaacatggctgtccagggaagaaactacatacctggacccagctaccgacaacaacgtgtctcaaccactgtgacttttaacaacaacagcgaatttgcttggcctggagcttcttcttgggctctcaatggacgtaatagcttgatgaatcctggacctgctatggccagccacaaagaaggagaggaccgtttctttcctttgtctggatctttaatttttggcaaacaaggaactggaagagacaacgtggatgcggacaaagtcatgctaaccaacgaagaagaaattaaaactactaacccggtagcaacggagtcctatggacaagtggccacaaaccaccagagtgcccgggcacaggcgcagaccggctgggttcaaaaccaaggaatacttccgggtatggtttggcaggacagagatgtgtacctgcaaggacccatttgggccaaaattcctcacacggacggcaactttcacccttctccgctgatgggagggtttggaatgaagcacccgcctcctcagatcctcatcaaaaacacacctgtacctgcggatcctccaacggccttcaacaagggcaagctgaactctttcatcacccagtattctactggccaagtcagcgtggagatcgagtgggagctgcagaaggaaaacagcaagcgctggaacccggagatccagtacacttccaactattacaagtctaataatgttgaatttgctgttaatactgaaggtgtatatagtgaaccccgccccattggcaccagatacctgactcgtaatctg

SEQ ID NO: 820 - protein, 736 aa, synthetic construct
  REGION 1..736: note = Adeno Associated Virus Capsid Protein Variant
MAADGYLPDWLEDNLSEGIREWWALKPGAPQPKANQQHQDNARGLVLPGYKYLGPGNGLDKGEPVNAADAAALEHDKAYDQQLKAGDNPYLKYNHADAEFQERLKEDTSFGGNLGRAVFQAKKRLLEPLGLVEEAAKTAPGKKRPVEQSPQEPDSSAGIGKSGAQPAKKRLNFGQTGDTESVPDPQPIGEPPAAPSGVGSLTMASGGGAPVADNNEGADGVGSSSGNWHCDSQWLGDRVITTSTRTWALPTYNNHLYKQISNSTSGGSSNDNAYFGYSTPWGYFDFNRFHCHFSPRDWQRLINNNWGFRPKRLNFKLFNIQVKEVTDNNGVKTIANNLTSTVQVFTDSDYQLPYVLGSAHEGCLPPFPADVFMIPQYGYLTLNDGSQAVGRSSFYCLEYFPSQMLRTGNNFQFSYEFENVPFHSSYAHSQSLDRLMNPLIDQYLYYLSKTINGSGQGQQTLKFSVAGPSNMAVQGRNYIPGPSYRQQRVSTTVTFNNNSEFAWPGASSWALNGRNSLMNPGPAMASHKEGEDRFFPLSGSLIFGKQGTGRDNVDADKVMLTNEEEIKTTNPVATESYGQVATNHQSARAQAQTGWVQNQGILPGMVWQDRDVYLQGPIWAKIPHTDGNFHPSPLMGGFGMKHPPPQILIKNTPVPADPPTAFNKGKLNSFITQYSTGQVSVEIEWELQKENSKRWNPEIQYTSNYYKSNNVEFAVNTEGVYSEPRPIGTRYLTRNL

SEQ ID NO: 821 - DNA, 2208 bp, synthetic construct
  misc_feature 1..2208: note = Adeno Associated Virus Capsid Protein Variant
  source 1..2208: mol_type = other DNA
atggctgccgatggttatcttccagattggctcgaggacaaccttagtgaaggaattcgcgagtggtgggctttgaaacctggagcccctcaacccaaggcaaatcaacaacatcaagacaacgctcgaggtcttgtgcttccgggttacaaataccttggacccggcaacggactcgacaagggggagccggtcaacgcagcagacgcggcggccctcgagcacgacaaggcctacgaccagcagctcaaggccggagacaacccgtacctcaagtacaaccacgccgacgccgagttcgtggagcggctcaaagaagatacgtcttttgggggcaacctcgggcgagcagtcttccaggccaaaaagaggcttcttgaacctcttggtctggttgaggaagcggctaagacggctcctggaaagaagaggcctgtagagcagtctcctcaggaaccggactcctccgcgggtattggcaaatcgggtgcacagcccgctaaaaagagactcaatttcggtcagactggcgacacagagtcagtcccagaccctcaaccaatcggagaacctcccgcagccccctcaggtgtgggatctcttacaatggcttcaggtggtggcgcaccagtggcagacaataacgaaggtgccgatggagtgggtagttcctcgggaaattggcattgcgattcccaatggctgggggacagagtcatcaccaccagcacccgaacctgggccctgcccacctacaacaatcacctctacaagcaaatctccaacagcacatctggaggatcttcaaatgacaacgcctacttcggctacagcaccccctgggggtattttgacttcaacagattccactgccacttctcaccacgtgactggcagcgactcatcaacaacaactggggattccggcctaagcgactcaacttcaagctcttcaacattcaggtcaaagaggttacggacaacaatggagtcaagaccatcgccaataaccttaccagcacggtccaggtcttcacggactcagactatcagctcccgtacgtgctcgggtcggctcacgagggctgcctcccgccgttcccagcggacgttttcatgattcctcagtacgggtatctgacgcttaatgatggaagccaggccgtgggtcgttcgtccttttactgcctggaatatttcccgtcgcaaatgctaagaacgggtaacaacttccagttcagctacgagtttgagaacgtacctttccatagcagctacgctcacagccaaagcctggaccgactaatgaatccactcatcgaccaatacttgtactatctctcaaagactattaacggttctggacagggccaacaaacgctaaaattcagtgtggccggacccagcaacatggctgtccagggaagaaactacatacctggacccagctaccgacaacaacgtgtctcaaccactgtgacttttaacaacaacagcgaatttgcttggcctggagcttcttcttgggctctcaatggacgtaatagcttgatgaatcctggacctgctatggccagccacaaagaaggagaggaccgtttctttcctttgtctggatctttaatttttggcaaacaaggaactggaagagacaacgtggatgcggacaaagtcatgataaccaacgaagaagaaattaaaactactaacccggtagcaacggagtcctatggacaagtggccacaaaccaccagagtgcccgggcacaggcgcagaccggctgggttcaaaaccaaggaatacttccgggtatggtttggcaggacagagatgtgtacctgcaaggacccatttgggccaaaattcctcacacggacggcaactttcacccttctccgctgatgggagggtttggaatgaagcacccgcctcctcagatcctcatcaaaaacacacctgtacctgcggatcctccaacggccttcaacaagggcaagctgaactctttcatcacccagtattctactggccaagtcagcgtggagatcgagtgggagctgcagaaggaaaacagcaagcgctggaacccggagatccagtacacttccaactattacaagtctaataatgttgaatttgctgttaatactgaaggtgtatatagtgaaccccgccccattggcaccagatacctgactcgtaatctg

SEQ ID NO: 822 - protein, 736 aa, synthetic construct
  REGION 1..736: note = Adeno Associated Virus Capsid Protein Variant
MAADGYLPDWLEDNLSEGIREWWALKPGAPQPKANQQHQDNARGLVLPGYKYLGPGNGLDKGEPVNAADAAALEHDKAYDQQLKAGDNPYLKYNHADAEFVERLKEDTSFGGNLGRAVFQAKKRLLEPLGLVEEAAKTAPGKKRPVEQSPQEPDSSAGIGKSGAQPAKKRLNFGQTGDTESVPDPQPIGEPPAAPSGVGSLTMASGGGAPVADNNEGADGVGSSSGNWHCDSQWLGDRVITTSTRTWALPTYNNHLYKQISNSTSGGSSNDNAYFGYSTPWGYFDFNRFHCHFSPRDWQRLINNNWGFRPKRLNFKLFNIQVKEVTDNNGVKTIANNLTSTVQVFTDSDYQLPYVLGSAHEGCLPPFPADVFMIPQYGYLTLNDGSQAVGRSSFYCLEYFPSQMLRTGNNFQFSYEFENVPFHSSYAHSQSLDRLMNPLIDQYLYYLSKTINGSGQGQQTLKFSVAGPSNMAVQGRNYIPGPSYRQQRVSTTVTFNNNSEFAWPGASSWALNGRNSLMNPGPAMASHKEGEDRFFPLSGSLIFGKQGTGRDNVDADKVMITNEEEIKTTNPVATESYGQVATNHQSARAQAQTGWVQNQGILPGMVWQDRDVYLQGPIWAKIPHTDGNFHPSPLMGGFGMKHPPPQILIKNTPVPADPPTAFNKGKLNSFITQYSTGQVSVEIEWELQKENSKRWNPEIQYTSNYYKSNNVEFAVNTEGVYSEPRPIGTRYLTRNL

SEQ ID NO: 823 - DNA, 2208 bp, synthetic construct
  misc_feature 1..2208: note = Adeno Associated Virus Capsid Protein Variant
  source 1..2208: mol_type = other DNA
atggctgccgatggttatcttccagattggctcgaggacaaccttagtgaaggaattcgcgagtggtgggctttgaaacctggagcccctcaacccaaggcaaatcaacaacatcaagacaacgctcgaggtcttgtgcttccgggttacaaataccttggacccggcaacggactcgacaagggggagccggtcaacgcagcagacgcggcggccctcgagcacgacaaggcctacgaccagcagctcaaggccggagacaacccgtacctcaagtacaaccacgccgacgccgagttccaggagcggctcaaagaagatacgtcttttgggggcaacctcgggcgagcagtcttccaggccaaaaagaggcttcttgaacctcttggtctggttgaggaagcggctaagacggctcctggaaagaagaggcctgtagagcagtctcctcaggaaccggactcctccgcgggtattggcaaatcgggtgcacagcccgctaaaaagagactcaatttcggtcagactggcgacacagagtcagtcccagaccctcaaccaatcggagaacctcccgcagccccctcaggtgtgggatctcttacaatggcttcaggtggtggcgcaccagtggcagacaataacgaaggtgccgatggagtgggtagttcctcgggaaattggcattgcgattcccaatggctgggggacagagtcatcaccaccagcacccgaacctgggccctgcccacctacaacaatcacctctacaagcaaatctccaacagcacatctggaggatcttcaaatgacaacgcctacttcggctacagcaccccctgggggtattttgacttcaacagattccactgccacttctcaccacgtgactggcagcgactcatcaacaacaactggggattccggcctaagcgactcaacttcaagctcttcaacattcaggtcaaagaggttacggacaacaatggagtcaagaccatcgccaataaccttaccagcacggtccaggtcttcacggactcagactatcagctcccgtacgtgctcgggtcggctcacgagggctgcctcccgccgttcccagcggacgttttcatgattcctcagtacgggtatctgacgcttaatgatggaagccaggccgtgggtcgttcgtccttttactgcctggaatatttcccgtcgcaaatgctaagaacgggtaacaacttccagttcagctacgagtttgagaacgtacctttccatagcagctacgctcacagccaaagcctggaccgactaatgaatccactcatcgaccaatacttgtactatctctcaaagactattaacggttctggacagggccaacaaacgctaaaattcagtgtggccggagctagcaacatggctgtccagggaagaaactacatacctggacccagctaccgacaacaacgtgtctcaaccactgtgacttttaacaacaacagcgaatttgcttggcctggagcttcttcttgggctctcaatggacgtaatagcttgatgaatcctggacctgctatggccagccacaaagaaggagaggaccgtttctttcctttgtctggatctttaatttttggcaaacaaggaactggaagagacaacgtggatgcggacaaagtcatgataaccaacgaagaagaaattaaaactactaacccggtagcaacggagtcctatggacaagtggccacaaaccaccagagtgcccgggcacaggcgcagaccggctgggttcaaaaccaaggaatacttccgggtatggtttggcaggacagagatgtgtacctgcaaggacccatttgggccaaaattcctcacacggacggcaactttcacccttctccgctgatgggagggtttggaatgaagcacccgcctcctcagatcctcatcaaaaacacacctgtacctgcggatcctccaacggccttcaacaagggcaagctgaactctttcatcacccagtattctactggccaagtcagcgtggagatcgagtgggagctgcagaaggaaaacagcaagcgctggaacccggagatccagtacacttccaactattacaagtctaataatgttgaatttgctgttaatactgaaggtgtatatagtgaaccccgccccattggcaccagatacctgactcgtaatctg

SEQ ID NO: 824 - protein, 736 aa, synthetic construct
  REGION 1..736: note = Adeno Associated Virus Capsid Protein Variant
MAADGYLPDWLEDNLSEGIREWWALKPGAPQPKANQQHQDNARGLVLPGYKYLGPGNGLDKGEPVNAADAAALEHDKAYDQQLKAGDNPYLKYNHADAEFQERLKEDTSFGGNLGRAVFQAKKRLLEPLGLVEEAAKTAPGKKRPVEQSPQEPDSSAGIGKSGAQPAKKRLNFGQTGDTESVPDPQPIGEPPAAPSGVGSLTMASGGGAPVADNNEGADGVGSSSGNWHCDSQWLGDRVITTSTRTWALPTYNNHLYKQISNSTSGGSSNDNAYFGYSTPWGYFDFNRFHCHFSPRDWQRLINNNWGFRPKRLNFKLFNIQVKEVTDNNGVKTIANNLTSTVQVFTDSDYQLPYVLGSAHEGCLPPFPADVFMIPQYGYLTLNDGSQAVGRSSFYCLEYFPSQMLRTGNNFQFSYEFENVPFHSSYAHSQSLDRLMNPLIDQYLYYLSKTINGSGQGQQTLKFSVAGASNMAVQGRNYIPGPSYRQQRVSTTVTFNNNSEFAWPGASSWALNGRNSLMNPGPAMASHKEGEDRFFPLSGSLIFGKQGTGRDNVDADKVMITNEEEIKTTNPVATESYGQVATNHQSARAQAQTGWVQNQGILPGMVWQDRDVYLQGPIWAKIPHTDGNFHPSPLMGGFGMKHPPPQILIKNTPVPADPPTAFNKGKLNSFITQYSTGQVSVEIEWELQKENSKRWNPEIQYTSNYYKSNNVEFAVNTEGVYSEPRPIGTRYLTRNL

SEQ ID NO: 825 - DNA, 2208 bp, synthetic construct
  misc_feature 1..2208: note = Adeno Associated Virus Capsid Protein Variant
  source 1..2208: mol_type = other DNA
atggctgccgatggttatcttccagattggctcgaggacaaccttagtgaaggaattcgcgagtggtgggctttgaaacctggagcccctcaacccaaggcaaatcaacaacatcaagacaacgctcgaggtcttgtgcttccgggttacaaataccttggacccggcaacggactcgacaagggggagccggtcaacgcagcagacgcggcggccctcgagcacgacaaggcctacgaccagcagctcaaggccggagacaacccgtacctcaagtacaaccacgccgacgccgagttccaggagcggctcaaagaagatacgtcttttgggggcaacctcgggcgagcagtcttccaggccaaaaagaggcttcttgaacctcttggtctggttgaggaagcggctaagacggctcctggaaagaagaggcctgtagagcagtctcctcaggaaccggactcctccgcgggtattggcaaatcgggtgcacagcccgctaaaaagagactcaatttcggtcagactggcgacacagagtcagtcccagaccctcaaccaatcggagaacctcccgcagccccctcaggtgtgggatctcttacaatggcttcaggtggtggcgcaccagtggcagacaataacgaaggtgccgatggagtgggtagttcctcgggaaattggcattgcgattcccaatggctgggggacagagtcatcaccaccagcacccgaacctgggccctgcccacctacaacaatcacctctacaagcaaatctccaacagcacatctggaggatcttcaaatgacaacgcctacttcggctacagcaccccctgggggtattttgacttcaacagattccactgccacttctcaccacgtgactggcagcgactcatcaacaacaactggggattccggcctaagcgactcaacttcaagctcttcaacattcaggtcaaagaggttacggacaacaatggacgtaagaccatcgccaataaccttaccagcacggtccaggtcttcacggactcagactatcagctcccgtacgtgctcgggtcggctcacgagggctgcctcccgccgttcccagcggacgttttcatgattcctcagtacgggtatctgacgcttaatgatggaagccaggccgtgggtcgttcgtccttttactgcctggaatatttcccgtcgcaaatgctaagaacgggtaacaacttccagttcagctacgagtttgagaacgtacctttccatagcagctacgctcacagccaaagcctggaccgactaatgaatccactcatcgaccaatacttgtactatctctcaaagactattaacggttctggacagggccaacaaacgctaaaattcagtgtggccggacccagcaacatggctgtccagggaagaaactacatacctggacccagctaccgacaacaacgtgtctcaaccactgtgacttttaacaacaacagcgaatttgcttggcctggagcttcttcttgggctctcaatggacgtaatagcttgatgaatcctggacctgctatggccagccacaaagaaggagaggaccgtttctttcctttgtctggatctttaatttttggcaaacaaggaactggaagagacaacgtggatgcggacaaagtcatgataaccaacgaagaagaaattaaaactactaacccggtagcaacggagtcctatggacaagtggccacaaaccaccagagtgcccgggcacaggcgcagaccggctgggttcaaaaccaaggaatacttccgggtatggtttggcaggacagagatgtgtacctgcaaggacccatttgggccaaaattcctcacacggacggcaactttcacccttctccgctgatgggagggtttggaatgaagcacccgcctcctcagatcctcatcaaaaacacacctgtacctgcggatcctccaacggccttcaacaagggcaagctgaactctttcatcacccagtattctactggccaagtcagcgtggagatcgagtgggagctgcagaaggaaaacagcaagcgctggaacccggagatccagtacacttccaactattacaagtctaataatgttgaatttgctgttaatactgaaggtgtatatagtgaaccccgccccattggcaccagatacctgactcgtaatctg

SEQ ID NO: 826 - protein, 736 aa, synthetic construct
  REGION 1..736: note = Adeno Associated Virus Capsid Protein Variant
MAADGYLPDWLEDNLSEGIREWWALKPGAPQPKANQQHQDNARGLVLPGYKYLGPGNGLDKGEPVNAADAAALEHDKAYDQQLKAGDNPYLKYNHADAEFQERLKEDTSFGGNLGRAVFQAKKRLLEPLGLVEEAAKTAPGKKRPVEQSPQEPDSSAGIGKSGAQPAKKRLNFGQTGDTESVPDPQPIGEPPAAPSGVGSLTMASGGGAPVADNNEGADGVGSSSGNWHCDSQWLGDRVITTSTRTWALPTYNNHLYKQISNSTSGGSSNDNAYFGYSTPWGYFDFNRFHCHFSPRDWQRLINNNWGFRPKRLNFKLFNIQVKEVTDNNGRKTIANNLTSTVQVFTDSDYQLPYVLGSAHEGCLPPFPADVFMIPQYGYLTLNDGSQAVGRSSFYCLEYFPSQMLRTGNNFQFSYEFENVPFHSSYAHSQSLDRLMNPLIDQYLYYLSKTINGSGQGQQTLKFSVAGPSNMAVQGRNYIPGPSYRQQRVSTTVTFNNNSEFAWPGASSWALNGRNSLMNPGPAMASHKEGEDRFFPLSGSLIFGKQGTGRDNVDADKVMITNEEEIKTTNPVATESYGQVATNHQSARAQAQTGWVQNQGILPGMVWQDRDVYLQGPIWAKIPHTDGNFHPSPLMGGFGMKHPPPQILIKNTPVPADPPTAFNKGKLNSFITQYSTGQVSVEIEWELQKENSKRWNPEIQYTSNYYKSNNVEFAVNTEGVYSEPRPIGTRYLTRNL

SEQ ID NO: 827 - DNA, 2208 bp, synthetic construct
  misc_feature 1..2208: note = Adeno Associated Virus Capsid Protein Variant
  source 1..2208: mol_type = other DNA
atggctgccgatggttatcttccagattggctcgaggacaaccttagtgaaggaattcgcgagtggtgggctttgaaacctggagcccctcaacccaaggcaaatcaacaacatcaagacaacgctcgaggtcttgtgcttccgggttacaaataccttggacccggcaacggactcgacaagggggagccggtcaacgcagcagacgcggcggccctcgagcacgacaaggcctacgaccagcagctcaaggccggagacaacccgtacctcaagtacaaccacgccgacgccgagttccaggagcggctcaaagaagatacgtcttttgggggcaacctcgggcgagcagtcttccaggccaaaaagaggcttcttgaacctcttggtctggttgaggaagcggctaagacggctcctggaaagaagaggcctgtagagcagtctcctcaggaaccggactcctccgcgggtattggcaaatcgggtgcacagcccgctaaaaagagactcaatttcggtcagactggcgacacagagtcagtcccagaccctcaaccaatcggagaacctcccgcagccccctcaggtgtgggatctcttacaatggcttcaggtggtggcgcaccagtggcagacaataacgaaggtgccgatggagtgggtagttcctcgggaaattggcattgcgattcccaatggctgggggacagagtcatcaccaccagcacccgaacctgggccctgcccacctacaacaatcacctctacaagcaaatctccaacagcacatctggaggatcttcaaatgacaacgcctacttcggctacagcaccccctgggggtattttgacttcaacagattccactgccacttctcaccacgtgactggcagcgactcatcaacaacaactggggattccggcctaagcgactcaacttcaagctcttcaacattcaggtcaaagaggttacggacaacaatggagtcaagaccatcgccaataaccttaccagcacggtccaggtcttcacggactcagactatcagctcccgtacgtgctcgggtcggctcacgagggctgcctcccgccgttcccagcggacgttttcatgattcctcagtacgggtatctgacgcttaatgatggaagccaggccgtgggtcgttcgtccttttactgcctggaatatttcccgtcgcaaatgctaagaacgggtaacaacttccagttcagctacgagtttgagaacgtacctttccatagcagctacgctcacagccaaagcctggaccgactaatgaatccactcatcgaccaatacttgtactatctctcaaagactcttaacggttctggacagggccaacaaacgctaaaattcagtgtggccggacccagcaacatggctgtccagggaagaaactacatacctggacccagctaccgacaacaacgtgtctcaaccactgtgacttttaacaacaacagcgaatttgcttggcctggagcttcttcttgggctctcaatggacgtaatagcttgatgaatcctggacctgctatggccagccacaaagaaggagaggaccgtttctttcctttgtctggatctttaatttttggcaaacaaggaactggaagagacaacgtggatgcggacaaagtcatgataaccaacgaagaagaaattaaaactactaacccggtagcaacggagtcctatggacaagtggccacaaaccaccagagtgcccgggcacaggcgcagaccggctgggttcaaaaccaaggaatacttccgggtatggtttggcaggacagagatgtgtacctgcaaggacccatttgggccaaaattcctcacacggacggcaactttcacccttctccgctgatgggagggtttggaatgaagcacccgcctcctcagatcctcatcaaaaacacacctgtacctgcggatcctccaacggccttcaacaagggcaagctgaactctttcatcacccagtattctactggccaagtcagcgtggagatcgagtgggagctgcagaaggaaaacagcaagcgctggaacccggagatccagtacacttccaactattacaagtctaataatgttgaatttgctgttaatactgaaggtgtatatagtgaaccccgccccattggcaccagatacctgactcgtaatctg

SEQ ID NO: 828 - protein, 736 aa, synthetic construct
  REGION 1..736: note = Adeno Associated Virus Capsid Protein Variant
MAADGYLPDWLEDNLSEGIREWWALKPGAPQPKANQQHQDNARGLVLPGYKYLGPGNGLDKGEPVNAADAAALEHDKAYDQQLKAGDNPYLKYNHADAEFQERLKEDTSFGGNLGRAVFQAKKRLLEPLGLVEEAAKTAPGKKRPVEQSPQEPDSSAGIGKSGAQPAKKRLNFGQTGDTESVPDPQPIGEPPAAPSGVGSLTMASGGGAPVADNNEGADGVGSSSGNWHCDSQWLGDRVITTSTRTWALPTYNNHLYKQISNSTSGGSSNDNAYFGYSTPWGYFDFNRFHCHFSPRDWQRLINNNWGFRPKRLNFKLFNIQVKEVTDNNGVKTIANNLTSTVQVFTDSDYQLPYVLGSAHEGCLPPFPADVFMIPQYGYLTLNDGSQAVGRSSFYCLEYFPSQMLRTGNNFQFSYEFENVPFHSSYAHSQSLDRLMNPLIDQYLYYLSKTLNGSGQGQQTLKFSVAGPSNMAVQGRNYIPGPSYRQQRVSTTVTFNNNSEFAWPGASSWALNGRNSLMNPGPAMASHKEGEDRFFPLSGSLIFGKQGTGRDNVDADKVMITNEEEIKTTNPVATESYGQVATNHQSARAQAQTGWVQNQGILPGMVWQDRDVYLQGPIWAKIPHTDGNFHPSPLMGGFGMKHPPPQILIKNTPVPADPPTAFNKGKLNSFITQYSTGQVSVEIEWELQKENSKRWNPEIQYTSNYYKSNNVEFAVNTEGVYSEPRPIGTRYLTRNL

SEQ ID NO: 829 - DNA, 2208 bp, synthetic construct
  misc_feature 1..2208: note = Adeno Associated Virus Capsid Protein Variant
  source 1..2208: mol_type = other DNA
atggctgccgatggttatcttccagattggctcgaggacaaccttagtgaaggaattcgcgagtggtgggctttgaaacctggagcccctcaacccaaggcaaatcaacaacatcaagacaacgctcgaggtcttgtgcttccgggttacaaataccttggacccggcaacggactcgacaagggggagccggtcaacgcagcagacgcggcggccctcgagcacgacaaggcctacgaccagcagctcaaggccggagacaacccgtacctcaagtacaaccacgccgacgccgagttccaggagcggctcaaagaagatacgtcttttgggggcaacctcgggcgagcagtcttccaggccaaaaagaggcttcttgaacctcttggtctggttgaggaagcggctaagacggctcctggaaagaagaggcctgtagagcagtctcctcaggaaccggactcctccgcgggtattggcaaatcgggtgcacagcccgctaaaaagagactcaatttcggtcagactggcgacacagagtcagtcccagaccctcaaccaatcggagaacctcccgcagccccctcaggtgtgggatctcttacaatggcttcaggtggtggcgcaccagtggcagacaataacgaaggtgccgatggagtgggtagttcctcgggaaattggcattgcgattcccaatggctgggggacagagtcatcaccaccagcacccgaacctgggccctgcccacctacaacaatcacctctacaagcaaatctccaacagcacatctggaggatcttcaaatgacaacgcctacttcggctacagcaccccctgggggtattttgacttcaacagattccactgccacttctcaccacgtgactggcagcgactcatcaacaacaactggggattccggcctaagcgactcaacttcaagctcttcaacattcaggtcaaagaggttacggacaacaatggagtcaagaccatcgccaataaccttaccagcacggtccaggtcttcacggactcagactatcagctcccgtacgtgctcgggtcggctcacgagggctgcctcccgccgttcccagcggacgttttcatgattcctcagtacgggtatctgacgcttaatgatggaagccaggccgtgggtcgttcgtccttttactgcctggaatatttcccgtcgcaaatgctaagaacgggtaacaacttccagttcagctacgagtttgagaacgtacctttccatagcagctacgctcacagccaaagcctggaccgactaatgaatccactcatcgaccaatacttgtactatctctcaaagactattaacggttctggacagggccaacaaacgctaaaattcagtgtggccggacccagcaacatggctgtccagggaagaaactacatacctggacccagctaccgacaacaacgtgtctcaaccactgtgacttttaacaacaacagcgaatttgcttggcctggagcttcttcttgggctctcaatggacgtaatagcttgatgaatcctggacctgctatggccagccacaaagaaggagaggaccgtttctttcctttgtctggatctttaatttttggcaaacaaggaactggaagagacaacgtggatgcggacaaagtcatgataaccaacgaagaagaaattaaaactactaacccggtagcaacggagtcctatggacaagtggccacaaaccaccagagtgcccgggcacaggcgcagaccaattgggttcaaaaccaaggaatacttccgggtatggtttggcaggacagagatgtgtacctgcaaggacccatttgggccaaaattcctcacacggacggcaactttcacccttctccgctgatgggagggtttggaatgaagcacccgcctcctcagatcctcatcaaaaacacacctgtacctgcggatcctccaacggccttcaacaagggcaagctgaactctttcatcacccagtattctactggccaagtcagcgtggagatcgagtgggagctgcagaaggaaaacagcaagcgctggaacccggagatccagtacacttccaactattacaagtctaataatgttgaatttgctgttaatactgaaggtgtatatagtgaaccccgccccattggcaccagatacctgactcgtaatctg

SEQ ID NO: 830 - protein, 736 aa, synthetic construct
  REGION 1..736: note = Adeno Associated Virus Capsid Protein Variant
MAADGYLPDWLEDNLSEGIREWWALKPGAPQPKANQQHQDNARGLVLPGYKYLGPGNGLDKGEPVNAADAAALEHDKAYDQQLKAGDNPYLKYNHADAEFQERLKEDTSFGGNLGRAVFQAKKRLLEPLGLVEEAAKTAPGKKRPVEQSPQEPDSSAGIGKSGAQPAKKRLNFGQTGDTESVPDPQPIGEPPAAPSGVGSLTMASGGGAPVADNNEGADGVGSSSGNWHCDSQWLGDRVITTSTRTWALPTYNNHLYKQISNSTSGGSSNDNAYFGYSTPWGYFDFNRFHCHFSPRDWQRLINNNWGFRPKRLNFKLFNIQVKEVTDNNGVKTIANNLTSTVQVFTDSDYQLPYVLGSAHEGCLPPFPADVFMIPQYGYLTLNDGSQAVGRSSFYCLEYFPSQMLRTGNNFQFSYEFENVPFHSSYAHSQSLDRLMNPLIDQYLYYLSKTINGSGQGQQTLKFSVAGPSNMAVQGRNYIPGPSYRQQRVSTTVTFNNNSEFAWPGASSWALNGRNSLMNPGPAMASHKEGEDRFFPLSGSLIFGKQGTGRDNVDADKVMITNEEEIKTTNPVATESYGQVATNHQSARAQAQTNWVQNQGILPGMVWQDRDVYLQGPIWAKIPHTDGNFHPSPLMGGFGMKHPPPQILIKNTPVPADPPTAFNKGKLNSFITQYSTGQVSVEIEWELQKENSKRWNPEIQYTSNYYKSNNVEFAVNTEGVYSEPRPIGTRYLTRNL

SEQ ID NO: 831 - DNA, 2208 bp, synthetic construct
  misc_feature 1..2208: note = Adeno Associated Virus Capsid Protein Variant
  source 1..2208: mol_type = other DNA
atggctgccgatggttatcttccagattggctcgaggacaaccttagtgaaggaattcgcgagtggtgggctttgaaacctggagcccctcaacccaaggcaaatcaacaacatcaagacaacgctcgaggtcttgtgcttccgggttacaaataccttggacccggcaacggactcgacaagggggagccggtcaacgcagcagacgcggcggccctcgagcacgacaaggcctacgaccagcagctcaaggccggagacaacccgtacctcaagtacaaccacgccgacgccgagttccaggagcggctcaaagaagatacgtcttttgggggcaacctcgggcgagcagtcttccaggccaaaaagaggcttcttgaacctcttggtctggttgaggaagcggctaagacggctcctggaaagaagaggcctgtagagcagtctcctcaggaaccggactcctccgcgggtattggcaaatcgggtgcacagcccgctaaaaagagactcaatttcggtcagactggcgacacagagtcagtcccagaccctcaaccaatcggagaacctcccgcagccccctcaggtgtgggatctcttacaatggcttcaggtggtggcgcaccagtggcagacaataacgaaggtgccgatggagtgggtagttcctcgggaaattggcattgcgattcccaatggctgggggacagagtcatcaccaccagcacccgaacctgggccctgcccacctacaacaatcacctctacaagcaaatctccaacagcacatctggaggatcttcaaatgacaacacctacttcggctacagcaccccctgggggtattttgacttcaacagattccactgccacttctcaccacgtgactggcagcgactcatcaacaacaactggggattccggcctaagcgactcaacttcaagctcttcaacattcaggtcaaagaggttacggacaacaatggagtcaagaccatcgccaataaccttaccagcacggtccaggtcttcacggactcagactatcagctcccgtacgtgctcgggtcggctcacgagggctgcctcccgccgttcccagcggacgttttcatgattcctcagtacgggtatctgacgcttaatgatggaagccaggccgtgggtcgttcgtccttttactgcctggaatatttcccgtcgcaaatgctaagaacgggtaacaacttccagttcagctacgagtttgagaacgtacctttccatagcagctacgctcacagccaaagcctggaccgactaatgaatccactcatcgaccaatacttgtactatctctcaaagactattaacggttctggacagggccaacaaacgctaaaattcagtgtggccggacccagcaacatggctgtccagggaagaaactacatacctggacccagctaccgacaacaacgtgtctcaaccactgtgacttttaacaacaacagcgaatttgcttggcctggagcttcttcttgggctctcaatggacgtaatagcttgatgaatcctggacctgctatggccagccacaaagaaggagaggaccgtttctttcctttgtctggatctttaatttttggcaaacaaggaactggaagagacaacgtggatgcggacaaagtcatgataaccaacgaagaagaaattaaaactactaacccggtagcaacggagtcctatggacaagtggccacaaaccaccagagtgcccgggcacaggcgcagaccggctgggttcaaaaccaaggaatacttccgggtatggtttggcaggacagagatgtgtacctgcaaggacccatttgggccaaaattcctcacacggacggcaactttcacccttctccgctgatgggagggtttggaatgaagcacccgcctcctcagatcctcatcaaaaacacacctgtacctgcggatcctccaacggccttcaacaagggcaagctgaactctttcatcacccagtattctactggccaagtcagcgtggagatcgagtgggagctgcagaaggaaaacagcaagcgctggaacccggagatccagtacacttccaactattacaagtctaataatgttgaatttgctgttaatactgaaggtgtatatagtgaaccccgccccattggcaccagatacctgactcgtaatctg

SEQ ID NO: 832 - protein, 736 aa, synthetic construct
  REGION 1..736: note = Adeno Associated Virus Capsid Protein Variant
MAADGYLPDWLEDNLSEGIREWWALKPGAPQPKANQQHQDNARGLVLPGYKYLGPGNGLDKGEPVNAADAAALEHDKAYDQQLKAGDNPYLKYNHADAEFQERLKEDTSFGGNLGRAVFQAKKRLLEPLGLVEEAAKTAPGKKRPVEQSPQEPDSSAGIGKSGAQPAKKRLNFGQTGDTESVPDPQPIGEPPAAPSGVGSLTMASGGGAPVADNNEGADGVGSSSGNWHCDSQWLGDRVITTSTRTWALPTYNNHLYKQISNSTSGGSSNDNTYFGYSTPWGYFDFNRFHCHFSPRDWQRLINNNWGFRPKRLNFKLFNIQVKEVTDNNGVKTIANNLTSTVQVFTDSDYQLPYVLGSAHEGCLPPFPADVFMIPQYGYLTLNDGSQAVGRSSFYCLEYFPSQMLRTGNNFQFSYEFENVPFHSSYAHSQSLDRLMNPLIDQYLYYLSKTINGSGQGQQTLKFSVAGPSNMAVQGRNYIPGPSYRQQRVSTTVTFNNNSEFAWPGASSWALNGRNSLMNPGPAMASHKEGEDRFFPLSGSLIFGKQGTGRDNVDADKVMITNEEEIKTTNPVATESYGQVATNHQSARAQAQTGWVQNQGILPGMVWQDRDVYLQGPIWAKIPHTDGNFHPSPLMGGFGMKHPPPQILIKNTPVPADPPTAFNKGKLNSFITQYSTGQVSVEIEWELQKENSKRWNPEIQYTSNYYKSNNVEFAVNTEGVYSEPRPIGTRYLTRNL

SEQ ID NO: 833 - DNA, 2208 bp, synthetic construct
  misc_feature 1..2208: note = Adeno Associated Virus Capsid Protein Variant
  source 1..2208: mol_type = other DNA
atggctgccgatggttatcttccagattggctcgaggacaaccttagtgaaggaattcgcgagtggtgggctttgaaacctggagcccctcaacccaaggcaaatcaacaacatcaagacaacgctcgaggtcttgtgcttccgggttacaaataccttggacccggcaacggactcgacaagggggagccggtcaacgcagcagacgcggcggccctcgagcacgacaaggcctacgaccagcagctcaaggccggagacaacccgtacctcaagtacaaccacgccgacgccgagttccaggagcggctcaaagaagatacgtcttttgggggcaacctcgggcgagcagtcttccaggccaaaaagaggcttcttgaacctcttggtctggttgaggaagcggctaagacggctcctggaaagaagaggcctgtagagcagtctcctcaggaaccggactcctccgcgggtattggcaaatcgggtgcacagcccgctaaaaagagactcaatttcggtcagactggcgacacagagtcagtcccagaccctcaaccaatcggagaacctcccgcagccccctcaggtgtgggatctcttacaatggcttcaggtggtggcgcaccagtggcagacaataacgaaggtgccgatggagtgggtagttcctcgggaaattggcattgcgattcccaatggctgggggacagagtcatcaccaccagcacccgaacctgggccctgcccacctacaacaatcacctctacaagcaaatctccaacagcacatctggaggatcttcaaatgacaacgcctacttcggctacagcaccccctgggggtattttgacttcaacagattccactgccacttctcaccacgtgactggcagcgactcatcaacaacaactggggattccggcctaagcgactcaacttcaagctcttcaacattcaggtcaaagaggttacggacaacaatggagtcaagaccatcgccaataaccttaccagcacggtccaggtcttcacggactcagactatcagctcccgtacgtgctcgggtcggctcacgagggctgcctcccgccgttcccagcggacgttttcatgattcctcagtacgggtatctgacgcttaatgatggaagccaggccatgggtcgttcgtccttttactgcctggaatatttcccgtcgcaaatgctaagaacgggtaacaacttccagttcagctacgagtttgagaacgtacctttccatagcagctacgctcacagccaaagcctggaccgactaatgaatccactcatcgaccaatacttgtactatctctcaaagactattaacggttctggacagggccaacaaacgctaaaattcagtgtggccggacccagcaacatggctgtccagggaagaaactacatacctggacccagctaccgacaacaacgtgtctcaaccactgtgacttttaacaacaacagcgaatttgcttggcctggagcttcttcttggtgcctcaatggacgtaatagcttgatgaatcctggacctgctatggccagccacaaagaaggagaggaccgtttctttcctttgtctggatctttaatttttggcaaacaaggaactggaagagacaacgtggatgcggacaaagtcatgataaccaacgaagaagaaattaaaactactaacccggtagcaacggagtcctatggacaagtggccacaaaccaccagagtgcccgggcacaggcgcagaccggctgggttcaaaaccaaggaatacttccgggtatggtttggcaggacagagatgtgtacctgcaaggacccatttgggccaaaattcctcacacggacggcaactttcacccttctccgctgatgggagggtttggaatgaagcacccgcctcctcagatcctcatcaaaaacacacctgtacctgcggatcctccaacggccttcaacaagggcaagctgaactctttcatcacccagtattctactggccaagtcagcgtggagatcgagtgggagctgcagaaggaaaacagcaagcgctggaacccggagatccagtacacttccaactattacaagtctaataatgttgaatttgctgttaatactgaaggtgtatatagtgaaccccgccccattggcaccagatacctgactcgtaatctg

SEQ ID NO: 834 - protein, 736 aa, synthetic construct
  REGION 1..736: note = Adeno Associated Virus Capsid Protein Variant
MAADGYLPDWLEDNLSEGIREWWALKPGAPQPKANQQHQDNARGLVLPGYKYLGPGNGLDKGEPVNAADAAALEHDKAYDQQLKAGDNPYLKYNHADAEFQERLKEDTSFGGNLGRAVFQAKKRLLEPLGLVEEAAKTAPGKKRPVEQSPQEPDSSAGIGKSGAQPAKKRLNFGQTGDTESVPDPQPIGEPPAAPSGVGSLTMASGGGAPVADNNEGADGVGSSSGNWHCDSQWLGDRVITTSTRTWALPTYNNHLYKQISNSTSGGSSNDNAYFGYSTPWGYFDFNRFHCHFSPRDWQRLINNNWGFRPKRLNFKLFNIQVKEVTDNNGVKTIANNLTSTVQVFTDSDYQLPYVLGSAHEGCLPPFPADVFMIPQYGYLTLNDGSQAMGRSSFYCLEYFPSQMLRTGNNFQFSYEFENVPFHSSYAHSQSLDRLMNPLIDQYLYYLSKTINGSGQGQQTLKFSVAGPSNMAVQGRNYIPGPSYRQQRVSTTVTFNNNSEFAWPGASSWCLNGRNSLMNPGPAMASHKEGEDRFFPLSGSLIFGKQGTGRDNVDADKVMITNEEEIKTTNPVATESYGQVATNHQSARAQAQTGWVQNQGILPGMVWQDRDVYLQGPIWAKIPHTDGNFHPSPLMGGFGMKHPPPQILIKNTPVPADPPTAFNKGKLNSFITQYSTGQVSVEIEWELQKENSKRWNPEIQYTSNYYKSNNVEFAVNTEGVYSEPRPIGTRYLTRNL

SEQ ID NO: 835 - DNA, 2208 bp, synthetic construct
  misc_feature 1..2208: note = Adeno Associated Virus Capsid Protein Variant
  source 1..2208: mol_type = other DNA
atggctgccgatggttatcttccagattggctcgaggacaaccttagtgaaggaattcgcgagtggtgggctttgaaacctggagcccctcaacccaaggcaaatcaacaacatcaagacaacgctcgaggtcttgtgcttccgggttacaaataccttggacccggcaacggactcgacaagggggagccggtcaacgcagcagacgcggcggccctcgagcacgacaaggcctacgaccagcagctcaaggccggagacaacccgtacctcaagtacaaccacgccgacgccgagttccaggagcggctcaaagaagatacgtcttttgggggcaacctcgggcgagcagtcttccaggccaaaaagaggcttcttgaacctcttggtctggttgaggaagcggctaagacggctcctggaaagaagaggcctgtagagcagtctcctcaggaaccggactcctccgcgggtattggcaaatcgggtgcacagcccgctaaaaagagactcaatttcggtcagactggcgacacagagtcagtcccagaccctcaaccaatcggagaacctcccgcagccccctcaggtgtgggatctcttacaatggcttcaggtggtggcgcaccagtggcagacaataacgaaggtgccgatggagtgggtagttcctcgggaaattggcattgcgattcccaatggctgggggacagagtcatcaccaccagcacccgaacctgggccctgcccacctacaacaatcacctctacaagcaaatctccaacagcacatctggaggatcttcaaatgacaacgcctacttcggctacagcaccccctgggggtattttgacttcaacagattccactgccacttctcaccacgtgactggcagcgactcatcaacaacaactggggattccggcctaagcgactcaacttcaagctcttcaacattcaggtcaaagaggttacggacaacaatggagtcaagaccatcgccaataaccttaccagcacggtccaggtcttcacggactcagactatcagctcccgtacgtgctcgggtcggctcacgagggctgcctcccgccgttcccagcggacgttttcatgattcctcagtacgggtatctgacgcttaatgatggaagccaggccgtgggtcgttcgtccttttactgcctggaatatttcccgtcgcaaatgctaagaacgggtaacaacttccagttcagctacgagtttgagaacgtacctttccatagcagctacgctcacagccaaagcctggaccgactaatgaatccactcatcgaccaatacttgtactatctctcaaagacttacaacggttctggacagggccaacaaacgctaaaattcagtgtggccggacccagcaacatggctgtccagggaagaaactacatacctggacccagctaccgacaacaacgtgtctcaaccactgtgacttttaacaacaacagcgaatttgcttggcctggagcttcttcttgggctctcaatggacgtaatagcttgatgaatcctggacctgctatggccagccacaaagaaggagaggaccgtttctttcctttgtctggatctttaatttttggcaaacaaggaactggaagagacaacgtggatgcggacaaagtcatgataaccaacgaagaagaaattaaaactactaacccggtagcaacggagtcctatggacaagtggccacaaaccaccagagtgcccgggcacaggcgcagaccggctgggttcaaaaccaaggaatacttccgggtatggtttggcaggacagagatgtgtacctgcaaggacccatttgggccaaaattcctcacacggacggcaactttcacccttctccgctgatgggagggtttggaatgaagcacccgcctcctcagatcctcatcaaaaacacacctgtacctgcggatcctccaacggccttcaacaagggcaagctgaactctttcatcacccagtattctactggccaagtcagcgtggagatcgagtgggagctgcagaaggaaaacagcaagcgctggaacccggagatccagtacacttccaactattacaagtctaataatgttgaatttgctgttaatactgaaggtgtatatagtgaaccccgccccattggcaccagatacctgactcgtaatctg

SEQ ID NO: 836 - protein, 736 aa, synthetic construct
  REGION 1..736: note = Adeno Associated Virus Capsid Protein Variant
MAADGYLPDWLEDNLSEGIREWWALKPGAPQPKANQQHQDNARGLVLPGYKYLGPGNGLDKGEPVNAADAAALEHDKAYDQQLKAGDNPYLKYNHADAEFQERLKEDTSFGGNLGRAVFQAKKRLLEPLGLVEEAAKTAPGKKRPVEQSPQEPDSSAGIGKSGAQPAKKRLNFGQTGDTESVPDPQPIGEPPAAPSGVGSLTMASGGGAPVADNNEGADGVGSSSGNWHCDSQWLGDRVITTSTRTWALPTYNNHLYKQISNSTSGGSSNDNAYFGYSTPWGYFDFNRFHCHFSPRDWQRLINNNWGFRPKRLNFKLFNIQVKEVTDNNGVKTIANNLTSTVQVFTDSDYQLPYVLGSAHEGCLPPFPADVFMIPQYGYLTLNDGSQAVGRSSFYCLEYFPSQMLRTGNNFQFSYEFENVPFHSSYAHSQSLDRLMNPLIDQYLYYLSKTYNGSGQGQQTLKFSVAGPSNMAVQGRNYIPGPSYRQQRVSTTVTFNNNSEFAWPGASSWALNGRNSLMNPGPAMASHKEGEDRFFPLSGSLIFGKQGTGRDNVDADKVMITNEEEIKTTNPVATESYGQVATNHQSARAQAQTGWVQNQGILPGMVWQDRDVYLQGPIWAKIPHTDGNFHPSPLMGGFGMKHPPPQILIKNTPVPADPPTAFNKGKLNSFITQYSTGQVSVEIEWELQKENSKRWNPEIQYTSNYYKSNNVEFAVNTEGVYSEPRPIGTRYLTRNL

SEQ ID NO: 837 - DNA, 2208 bp, synthetic construct
  misc_feature 1..2208: note = Adeno Associated Virus Capsid Protein Variant
  source 1..2208: mol_type = other DNA
atggctgccgatggttatcttccagattggctcgaggacaaccttagtgaaggaattcgcgagtggtgggctttgaaacctggagcccctcaacccaaggcaaatcaacaacatcaagacaacgctcgaggtcttgtgcttccgggttacaaataccttggacccggcaacggactcgacaagggggagccggtcaacgcagcagacgcggcggccctcgagcacgacaaggcctacgaccagcagctcaaggccggagacaacccgtacctcaagtacaaccacgccgacgccgagttccaggagcggctcaaagaagatacgtcttttgggggcaacctcgggcgagcagtcttccaggccaaaaagaggcttcttgaacctcttggtctggttgaggaagcggctaagacggctcctggaaagaagaggcctgtagagcagtctcctcaggaaccggactcctccgcgggtattggcaaatcgggtgcacagcccgctaaaaagagactcaatttcggtcagactggcgacacagagtcagtcccagaccctcaaccaatcggactacctcccgcagccccctcaggtgtgggatctcttacaatggcttcaggtggtggcgcaccagtggcagacaataacgaaggtgccgatggagtgggtagttcctcgggaaattggcattgcgattcccaatggctgggggacagagtcatcaccaccagcacccgaacctgggccctgcccacctacaacaatcacctctacaagcaaatctccaacagcacatctggaggatcttcaaatgacaacgcctacttcggctacagcaccccctgggggtattttgacttcaacagattccactgccacttctcaccacgtgactggcagcgactcatcaacaacaactggggattccggcctaagcgactcaacttcaagctcttcaacattcaggtcaaagaggttacggacaacaatggagtcaagaccatcgccaataaccttaccagcacggtccaggtcttcacggactcagactatcagctcccgtacgtgctcgggtcggctcacgagggctgcctcccgccgttcccagcggacgttttcatgattcctcagtacgggtatctgacgcttaatgatggaagccaggccgtgggtcgttcgtccttttactgcctggaatatttcccgtcgcaaatgctaagaacgggtaacaacttccagttcagctacgagtttgagaacgtacctttccatagcagctacgctcacagccaaagcctggaccgactaatgaatccactcatcgaccaatacttgtactatctctcaaagactattaacggttctggacagggccaacaaacgctaaaattcagtgtggccggacccagcaacatggctgtccagggaagaaactacatacctggacccagctaccgacaacaacgtgtctcaaccactgtgacttttaacaacaacagcgaatttgcttggcctggagcttcttcttgggctctcaatggacgtaatagcttgatgaatcctggacctgctatggccagccacaaagaaggagaggaccgtttctttcctttgtctggatctttaatttttggcaaacaaggaactggaagagacaacgtggatgcggacaaagtcatgataaccaacgaagaagaaattaaaactactaacccggtagcaacggagtcctatggacaagtggccacaaaccaccagagtgcccgggcacaggcgcagaccggctgggttcaaaaccaaggaatacttccgggtatggtttggcaggacagagatgtgtacctgcaaggacccatttgggccaaaattcctcacacggacggcaactttcacccttctccgctgatgggagggtttggaatgaagcacccgcctcctcagatcctcatcaaaaacacacctgtacctgcggatcctccaacggccttcaacaagggcaagctgaactctttcatcacccagtattctactggccaagtcagcgtggagatcgagtgggagctgcagaaggaaaacagcaagcgctggaacccggagatccagtacacttccaactattacaagtctaataatgttgaatttgctgttaatactgaaggtgtatatagtgaaccccgccccattggcaccagatacctgactcgtaatctg

SEQ ID NO: 838 - protein, 736 aa, synthetic construct
  REGION 1..736: note = Adeno Associated Virus Capsid Protein Variant
MAADGYLPDWLEDNLSEGIREWWALKPGAPQPKANQQHQDNARGLVLPGYKYLGPGNGLDKGEPVNAADAAALEHDKAYDQQLKAGDNPYLKYNHADAEFQERLKEDTSFGGNLGRAVFQAKKRLLEPLGLVEEAAKTAPGKKRPVEQSPQEPDSSAGIGKSGAQPAKKRLNFGQTGDTESVPDPQPIGLPPAAPSGVGSLTMASGGGAPVADNNEGADGVGSSSGNWHCDSQWLGDRVITTSTRTWALPTYNNHLYKQISNSTSGGSSNDNAYFGYSTPWGYFDFNRFHCHFSPRDWQRLINNNWGFRPKRLNFKLFNIQVKEVTDNNGVKTIANNLTSTVQVFTDSDYQLPYVLGSAHEGCLPPFPADVFMIPQYGYLTLNDGSQAVGRSSFYCLEYFPSQMLRTGNNFQFSYEFENVPFHSSYAHSQSLDRLMNPLIDQYLYYLSKTINGSGQGQQTLKFSVAGPSNMAVQGRNYIPGPSYRQQRVSTTVTFNNNSEFAWPGASSWALNGRNSLMNPGPAMASHKEGEDRFFPLSGSLIFGKQGTGRDNVDADKVMITNEEEIKTTNPVATESYGQVATNHQSARAQAQTGWVQNQGILPGMVWQDRDVYLQGPIWAKIPHTDGNFHPSPLMGGFGMKHPPPQILIKNTPVPADPPTAFNKGKLNSFITQYSTGQVSVEIEWELQKENSKRWNPEIQYTSNYYKSNNVEFAVNTEGVYSEPRPIGTRYLTRNL

SEQ ID NO: 839 - DNA, 2208 bp, synthetic construct
  misc_feature 1..2208: note = Adeno Associated Virus Capsid Protein Variant
  source 1..2208: mol_type = other DNA
atggctgccgatggttatcttccagattggctcgaggacaaccttagtgaaggaattcgcgagtggtgggctttgaaacctggagcccctcaacccaaggcaaatcaacaacatcaagacaacgctcgaggtcttgtgcttccgggttacaaataccttggacccggcaacggactcgacaagggggagccggtcaacgcagcagacgcggcggccctcgagcacgacaaggcctacgaccagcagctcaaggccggagacaacccgtacctcaagtacaaccacgccgacgccgagttccaggagcggctcaaagaagatacgtcttttgggggcaacctcgggcgagcagtcttccaggccaaaaagaggcttcttgaacctcttggtctggttgaggaagcggctaagacggctcctggaaagaagaggcctgtagagcagtctcctcaggaaccggactcctccgcgggtattggcaaatcgggtgcacagcccgctaaaaagagactcaatttcggtcagactggcgacacagagtcagtcccagaccctcaaccaatcggagaacctcccgcagccccctcaggtgtgggatctcttacaatggcttcaggtggtggcgcaccagtggcagacaataacgaaggtgccgatggagtgggtagttcctcgggaaattggcattgcgattcccaatggctgggggacagagtcatcaccaccagcacccgaacctgggccctgcccacctacaacaatcacctctacaagcaaatctccaacagcacatctggaggatcttcaaatgacaacgcctacttcggctacagcaccccctgggggtattttgacttcaacagattccactgccacttctcaccacgtgactggcagcgactcatcaacaacaactggggattccggcctaagcgactcaacttcaagctcttcaacattcaggtcaaagaggttacggacacgaatggagtcaagaccatcgccaataaccttaccagcacggtccaggtcttcacggactcagactatcagctcccgtacgtgctcgggtcggctcacgagggctgcctcccgccgttcccagcggacgttttcatgattcctcagtacgggtatctgacgcttaatgatggaagccaggccgtgggtcgttcgtccttttactgcctggaatatttcccgtcgcaaatgctaagaacgggtaacaacttccagttcagctacgagtttgagaacgtacctttccatagcagctacgctcacagccaaagcctggaccgactaatgaatccactcatcgaccaatacttgtactatctctcaaagactattaacggttctggacagggccaacaaacgctaaaattcagtgtggccggacccagcaacatggctgtccagggaagaaactacatacctggacccagctaccgacaacaacgtgtctcaaccactgtgacttttaacaacaacagcgaatttgcttggcctggagcttcttcttgggctctcaatggacgtaatagcttgatgaatcctggacctgctatggccagccacaaagaaggagaggaccgtttctttcctttgtctggatctttaatttttggcaaacaaggaactggaagagacaacgtggatgcggacaaagtcatgataaccaacgaagaagaaattaaaactactaacccggtagcaacggagtcctatggacaagtggccacaaaccaccagagtgcccgggcacaggcgcagaccggctgggttcaaaaccaaggaatacttccgggtatggtttggcaggacagagatgtgtacctgcaaggacccatttgggccaaaattcctcacacggacggcaactttcacccttctccgctgatgggagggtttggaatgaagcacccgcctcctcagatcctcatcaaaaacacacctgtacctgcggatcctccaacggccttcaacaagggcaagctgaactctttcatcacccagtattctactggccaagtcagcgtggagatcgagtgggagctgcagaaggaaaacagcaagcgctggaacccggagatccagtacacttccaactattacaagtctaataatgttgaatttgctgttaatactgaaggtgtatatagtgaaccccgccccattggcaccagatacctgactcgtaatctg

SEQ ID NO: 840 - protein, 736 aa, synthetic construct
  REGION 1..736: note = Adeno Associated Virus Capsid Protein Variant
MAADGYLPDWLEDNLSEGIREWWALKPGAPQPKANQQHQDNARGLVLPGYKYLGPGNGLDKGEPVNAADAAALEHDKAYDQQLKAGDNPYLKYNHADAEFQERLKEDTSFGGNLGRAVFQAKKRLLEPLGLVEEAAKTAPGKKRPVEQSPQEPDSSAGIGKSGAQPAKKRLNFGQTGDTESVPDPQPIGEPPAAPSGVGSLTMASGGGAPVADNNEGADGVGSSSGNWHCDSQWLGDRVITTSTRTWALPTYNNHLYKQISNSTSGGSSNDNAYFGYSTPWGYFDFNRFHCHFSPRDWQRLINNNWGFRPKRLNFKLFNIQVKEVTDTNGVKTIANNLTSTVQVFTDSDYQLPYVLGSAHEGCLPPFPADVFMIPQYGYLTLNDGSQAVGRSSFYCLEYFPSQMLRTGNNFQFSYEFENVPFHSSYAHSQSLDRLMNPLIDQYLYYLSKTINGSGQGQQTLKFSVAGPSNMAVQGRNYIPGPSYRQQRVSTTVTFNNNSEFAWPGASSWALNGRNSLMNPGPAMASHKEGEDRFFPLSGSLIFGKQGTGRDNVDADKVMITNEEEIKTTNPVATESYGQVATNHQSARAQAQTGWVQNQGILPGMVWQDRDVYLQGPIWAKIPHTDGNFHPSPLMGGFGMKHPPPQILIKNTPVPADPPTAFNKGKLNSFITQYSTGQVSVEIEWELQKENSKRWNPEIQYTSNYYKSNNVEFAVNTEGVYSEPRPIGTRYLTRNL

SEQ ID NO: 841 - DNA, 2208 bp, synthetic construct
  misc_feature 1..2208: note = Adeno Associated Virus Capsid Protein Variant
  source 1..2208: mol_type = other DNA
atggctgccgatggttatcttccagattggctcgaggacaaccttagtgaaggaattcgcgagtggtgggctttgaaacctggagcccctcaacccttggcaaatcaacaacatcaagacaacgctcgaggtcttgtgcttccgggttacaaataccttggacccggcaacggactcgacaagggggagccggtcaacgcagcagacgcggcggccctcgagcacgacaaggcctacgaccagcagctcaaggccggagacaacccgtacctcaagtacaaccacgccgacgccgagttccaggagcggctcaaagaagatacgtcttttgggggcaacctcgggcgagcagtcttccaggccaaaaagaggcttcttgaacctcttggtctggttgaggaagcggctaagacggctcctggaaagaagaggcctgtagagcagtctcctcaggaaccggactcctccgcgggtattggcaaatcgggtgcacagcccgctaaaaagagactcaatttcggtcagactggcgacacagagtcagtcccagaccctcaaccaatcggagaacctcccgcagccccctcaggtgtgggatctcttacaatggcttcaggtggtggcgcaccagtggcagacaataacgaaggtgccgatggagtgggtagttcctcgggaaattggcattgcgattcccaatggctgggggacagagtcatcaccaccagcacccgaacctgggccctgcccacctacaacaatcacctctacaagcaaatctccaacagcacatctggaggatcttcaaatgacaacgcctacttcggctacagcaccccctgggggtattttgacttcaacagattccactgccacttctcaccacgtgactggcagcgactcatcaacaacaactggggattccggcctaagcgactcaacttcaagctcttcaacattcaggtcaaagaggttacggacaacaatggagtcaagaccatcgccaataaccttaccagcacggtccaggtcttcacggactcagactatcagctcccgtacgtgctcgggtcggctcacgagggctgcctcccgccgttcccagcggacgttttcatgattcctcagtacgggtatctgacgcttaatgatggaagccaggccgtgggtcgttcgtccttttactgcctggaatatttcccgtcgcaaatgctaagaacgggtaacaacttccagttcagctacgagtttgagaacgtacctttccatagcagctacgctcacagccaaagcctggaccgactaatgaatccactcatcgaccaatacttgtactatctctcaaagactattaacggttctggacagggccaacaaacgctaaaattcagtgtggccggacccagcaacatggctgtccagggaagaaactacatacctggacccagctaccgacaacaacgtgtctcaaccactgtgacttttaacaacaacagcgaatttgcttggcctggagcttcttcttgggctctcaatggacgtaatagcttgatgaatcctggacctgctatggccagccacaaagaaggagaggaccgtttctttcctttgtctggatctttaatttttggcaaacaaggaactggaagagacaacgtggatgcggacaaagtcatgataaccaacgaagaagaaattaaaactactaacccggtagcaacggagtcctatggacaagtggccacaaaccaccagagtgcccgggcacaggcgcagaccggctgggttcaaaaccaaggaatacttccgggtatggtttggcaggacagagatgtgtacctgcaaggacccatttgggccaaaattcctcacacggacggcaactttcacccttctccgctgatgggagggtttggaatgaagcacccgcctcctcagatcctcatcaaaaacacacctgtacctgcggatcctccaacggccttcaacaagggcaagctgaactctttcatcacccagtattctactggccaagtcagcgtggagatcgagtgggagctgcagaaggaaaacagcaagcgctggaacccggagatccagtacacttccaactattacaagtctaataatgttgaatttgctgttaatactgaaggtgtatatagtgaaccccgccccattggcaccagatacctgactcgtaatctg

SEQ ID NO: 842 - protein, 736 aa, synthetic construct
  REGION 1..736: note = Adeno Associated Virus Capsid Protein Variant
MAADGYLPDWLEDNLSEGIREWWALKPGAPQPLANQQHQDNARGLVLPGYKYLGPGNGLDKGEPVNAADAAALEHDKAYDQQLKAGDNPYLKYNHADAEFQERLKEDTSFGGNLGRAVFQAKKRLLEPLGLVEEAAKTAPGKKRPVEQSPQEPDSSAGIGKSGAQPAKKRLNFGQTGDTESVPDPQPIGEPPAAPSGVGSLTMASGGGAPVADNNEGADGVGSSSGNWHCDSQWLGDRVITTSTRTWALPTYNNHLYKQISNSTSGGSSNDNAYFGYSTPWGYFDFNRFHCHFSPRDWQRLINNNWGFRPKRLNFKLFNIQVKEVTDNNGVKTIANNLTSTVQVFTDSDYQLPYVLGSAHEGCLPPFPADVFMIPQYGYLTLNDGSQAVGRSSFYCLEYFPSQMLRTGNNFQFSYEFENVPFHSSYAHSQSLDRLMNPLIDQYLYYLSKTINGSGQGQQTLKFSVAGPSNMAVQGRNYIPGPSYRQQRVSTTVTFNNNSEFAWPGASSWALNGRNSLMNPGPAMASHKEGEDRFFPLSGSLIFGKQGTGRDNVDADKVMITNEEEIKTTNPVATESYGQVATNHQSARAQAQTGWVQNQGILPGMVWQDRDVYLQGPIWAKIPHTDGNFHPSPLMGGFGMKHPPPQILIKNTPVPADPPTAFNKGKLNSFITQYSTGQVSVEIEWELQKENSKRWNPEIQYTSNYYKSNNVEFAVNTEGVYSEPRPIGTRYLTRNL

SEQ ID NO: 843 - DNA, 2208 bp, synthetic construct
  misc_feature 1..2208: note = Adeno Associated Virus Capsid Protein Variant
  source 1..2208: mol_type = other DNA
atggctgccgatggttatcttccagattggctcgaggacaaccttagtgaaggaattcgcgagtggtgggctttgaaacctggagcccctcaacccaaggcaaatcaacaacatcaagacaacgctcgaggtcttgtgcttccgggttacaaataccttggacccggcaacggactcgacaagggggagccggtcaacgcagcagacgcggcggccctcgagcacgacaaggcctacgaccagcagctcaaggccggagacaacccgtacctcaagtacaaccacgccgacgccgagttccaggagcggctcaaagaagatacgtcttttgggggcaacctcgggcgagcagtcttccaggccaaaaagaggcttcttgaacctcttggtctggttgaggaagcggctaagacggctcctggaaagaagaggcctgtagagcagtctcctcaggaaccggactcctccgcgggtattggcaaatcgggtgcacagcccgctaaaaagagactcaatttcggtcagactggcgacacagagtcagtcccagaccctcaaccaatcggagaacctcccgcagccccctcaggtgtgggatctcttacaatggcttcaggtggtggcgcaccagtggcagacaataacgaaggtgccgatggagtgggtagttcctcgggaaattggcattgcgattcccaatggctgggggacagagtcatcaccaccagcacccgaacctgggccctgcccacctacaacaatcacctctacaagcaaatctccaacagcacatctggaggatcttcaaatgacaacgcctacttcggctacagcaccccctgggggtattttgacttcaacagattccactgccacttctcaccacgtgactggcagcgactcatcaacaacaactggggattccggcctaagcgactcaacttcaagctcttcaacattcaggtcaaagaggttacggacaacaatggagtcaagaccatcgccaataaccttaccagcacggtccaggtcttcacggactcagactatcagctcccgtacgtgctcgggtcggctcacgagggctgcctcccgccgttcccagcggacgttttcatgattcctcagtacgggtatctgacgcttaatgatggaagccaggccgtgggtcgttcgtccttttactgcctggaatatttcccgtcgcaaatgctaagaacgggtaacaacttccagttcagctacgagtttgagaacgtacctttccatagcagctacgctcacagccaaagcctggaccgactaatgaatccactcatcgaccaatacttgtactatctctcaaagactattaacggttctggacagggccaacaaacgctaaaattcagtgtggccggacccagccaaatggctgtccagggaagaaactacatacctggacccagctaccgacaacaacgtgtctcaaccactgtgacttttaacaacaacagcgaatttgcttggcctggagcttcttcttgggctctcaatggacgtaatagcttgatgaatcctggacctgctatggccagccacaaagaaggagaggaccgtttctttcctttgtctggatctttaatttttggcaaacaaggaactggaagagacaacgtggatgcggacaaagtcatgataaccaacgaagaagaaattaaaactactaacccggtagcaacggagtcctatggacaagtggccacaaaccaccagagtgcccgggcacaggcgcagaccggctgggttcaaaaccaaggaatacttccgggtatggtttggcaggacagagatgtgtacctgcaaggacccatttgggccaaaattcctcacacggacggcaactttcacccttctccgctgatgggagggtttggaatgaagcacccgcctcctcagatcctcatcaaaaacacacctgtacctgcggatcctccaacggccttcaacaagggcaagctgaactctttcatcacccagtattctactggccaagtcagcgtggagatcgagtgggagctgcagaaggaaaacagcaagcgctggaacccggagatccagtacacttccaactattacaagtctaataatgttgaatttgctgttaatactgaaggtgtatatagtgaaccccgccccattggcaccagatacctgactcgtaatctg

SEQ ID NO: 844 - protein, 736 aa, synthetic construct
  REGION 1..736: note = Adeno Associated Virus Capsid Protein Variant
MAADGYLPDWLEDNLSEGIREWWALKPGAPQPKANQQHQDNARGLVLPGYKYLGPGNGLDKGEPVNAADAAALEHDKAYDQQLKAGDNPYLKYNHADAEFQERLKEDTSFGGNLGRAVFQAKKRLLEPLGLVEEAAKTAPGKKRPVEQSPQEPDSSAGIGKSGAQPAKKRLNFGQTGDTESVPDPQPIGEPPAAPSGVGSLTMASGGGAPVADNNEGADGVGSSSGNWHCDSQWLGDRVITTSTRTWALPTYNNHLYKQISNSTSGGSSNDNAYFGYSTPWGYFDFNRFHCHFSPRDWQRLINNNWGFRPKRLNFKLFNIQVKEVTDNNGVKTIANNLTSTVQVFTDSDYQLPYVLGSAHEGCLPPFPADVFMIPQYGYLTLNDGSQAVGRSSFYCLEYFPSQMLRTGNNFQFSYEFENVPFHSSYAHSQSLDRLMNPLIDQYLYYLSKTINGSGQGQQTLKFSVAGPSQMAVQGRNYIPGPSYRQQRVSTTVTFNNNSEFAWPGASSWALNGRNSLMNPGPAMASHKEGEDRFFPLSGSLIFGKQGTGRDNVDADKVMITNEEEIKTTNPVATESYGQVATNHQSARAQAQTGWVQNQGILPGMVWQDRDVYLQGPIWAKIPHTDGNFHPSPLMGGFGMKHPPPQILIKNTPVPADPPTAFNKGKLNSFITQYSTGQVSVEIEWELQKENSKRWNPEIQYTSNYYKSNNVEFAVNTEGVYSEPRPIGTRYLTRNL

SEQ ID NO: 845 - DNA, 2208 bp, synthetic construct
  misc_feature 1..2208: note = Adeno Associated Virus Capsid Protein Variant
  source 1..2208: mol_type = other DNA
atggctgccgatggttatcttccagattggctcgaggacaaccttagtgaaggaattcgcgagtggtgggctttgaaacctggagcccctcaacccaaggcaaatcaacaacatcaagacaacgctcgaggtcttgtgcttccgggttacaaataccttggacccggcaacggactcgacaagggggagccggtcaacgcagcagacgcggcggccctcgagcacgacaaggcctacgaccagcagctcaaggccggagacaacccgtacctcaagtacaaccacgccgacgccgagttccaggagcggctcaaagaagatacgtcttttgggggcaacctcgggcgagcagtcttccaggccaaaaagaggcttcttgaacctcttggtctggttgaggaagcggctaagacggctcctggaaagaagaggcctgtagagcagtctcctcaggaaccggactcctccgcgggtattggcaaatcgggtgcacagcccgctaaaaagagactcaatttcggtcagactggcgacacagagtcagtcccagaccctcaaccaatcggagaacctcccgcagccccctcaggtgtgggatctcttacaatggcttcaggtggtggcgcaccagtggcagacaataacgaaggtgccgatggagtgggtagttcctcgggaaattggcattgcgattcccaatggctgggggacagagtcatcaccaccagcacccgaacctgggccctgcccacctacaacaatcacctctacaagcaaatctccaacagcacatctggaggatcttcaaatgacaacgcctacttcggctacagcaccccctgggggtattttgacttcaacagattccactgccacttctcaccacgtgactggcagcgactcatcaacaacaactggggattccggcctaagcgactcaacttcaagctcttcaacattcaggtcaaagaggttacggacaacaatggagtcaagaccatcgccaataaccttaccagcacggtccaggtcttcacggactcagactatcagctcccgtacgtgctcgggtcggctcacgagggctgcctcccgccgttcccagccgacgttttcatgattcctcagtacgggtatctgacgcttaatgatggaagccaggccgtgggtcgttcgtccttttactgcctggaatatttcccgtcgcaaatgctaagaacgggtaacaacttccagttcagctacgagtttgagaacgtacctttccatagcagctacgctcacagccaaagcctggaccgactaatgaatccactcatcgaccaatacttgtactatctctcaaagactattaacggttctggacagggccaacaaacgctaaaattcagtgtggccggacccagcaacatggctgtccagggaagaaactacatacctggacccagctaccgacaacaacgtgtctcaaccactgtgacttttaacaacaacagcgaatttgcttggcctggagcttcttcttgggctctcaatggacgtaatagcttgatgaatcctggacctgctatggccagccacaaagaaggagaggaccgtttctttcctttgtctggatctttaatttttggcaaacaaggaactggaagagacaacgtggatgcggacaaagtcatgataaccaacgaagaagaaattaaaactactaacccggtagcaacggagtcctatggacaagtggccacaaaccaccagagtgcccgggcacaggcgcagaccggctgggttcaaaaccaaggaatacttccgggtatggtttggcaggacagagatgtgtacctgcaaggacccatttgggccaaaattcctcacacggacggcaactttcacccttctccgctgatgggagggtttggaatgaagcacccgcctcctcagatcctcatcaaaaacacacctgtacctgcggatcctccaacggccttcaacaagggcaagctgaactctttcatcacccagtattctactggccaagtcagcgtggagatcgagtgggagctgcagaaggaaaacagcaagcgctggaacccggagatccagtacacttccaactattacaagtctaataatgttgaatttgctgttaatactgaaggtgtatatagtgaaccccgccccattggcaccagatacctgactcgtaatctg

SEQ ID NO: 846 - protein, 736 aa, synthetic construct; identical to SEQ ID NO: 552
  REGION 1..736: note = Adeno Associated Virus Capsid Protein Variant

SEQ ID NO: 847 - DNA, 2208 bp, synthetic construct
  misc_feature 1..2208: note = Adeno Associated Virus Capsid Protein Variant
  source 1..2208: mol_type = other DNA
atggctgccgatggttatcttccagattggctcgaggacaaccttagtgaaggaattcgcgagtggtgggctttgaaacctggagcccctcaacccaaggcaaatcaacaacatcaagacaacgctcgaggtcttgtgcttccgggttacaaataccttggacccggcaacggactcgacaagggggagccggtcaacgcagcagacgcggcggccctcgagcacgacaaggcctacgaccagcagctcaaggccggagacaacccgtacctcaagtacaaccacgccgacgccgagttccaggagcggctcaaagaagatacgtcttttgggggcaacctcgggcgagcagtcttccaggccaaaaagaggcttcttgaacctcttggtctggttgaggaagcggctaagacggctcctggaaagaagaggcctgtagagcagtctcctcaggaaccggactcctccgcgggtattggcaaatcgggtgcacagcccgctaaaaagagactcaatttcggtcagactggcgacacagagtcagtcccagaccctcaaccaatcggagaacctcccgcagccccctcaggtgtgggatctcttacaatggcttcaggtggtggcgcaccagtggcagacaataacgaaggtgccgatggagtgggtagttcctcgggaaattggcattgcgattcccaatggctgggggacagagtcatcaccaccagcacccgaacctgggccctgcccacctacaacaatcacctctacaagcaaatctccaacagcacatctggaggatcttcaaatgacaacgccttcttcggctacagcaccccctgggggtattttgacttcaacagattccactgccacttctcaccacgtgactggcagcgactcatcaacaacaactggggattccggcctaagcgactcaacttcaagctcttcaacattcaggtcaaagaggttacggacaacaatggagtcaagaccatcgccaataaccttaccagcacggtccaggtcttcacggactcagactatcagctcccgtacgtgctcgggtcggctcacgagggctgcctcccgccgttcccagcggacgttttcatgattcctcagtacgggtatctgacgcttaatgatggaagccaggccgtgggtcgttcgtccttttactgcctggaatatttcccgtcgcaaatgctaagaacgggtaacaacttccagttcagctacgagtttgagaacgtacctttccatagcagctacgctcacagccaaagcctggaccgactaatgaatccactcatcgaccaatacttgtactatctctcaaagactattaacggttctggacagggccaacaaacgctaaaattcagtgtggccggacccagcaacatggctgtccagggaagaaactacatacctggacccagctaccgacaacaacgtgtctcaaccactgtgacttttaacaacaacagcgaatttgcttggcctggagcttcttcttgggctctcaatggacgtaatagcttgatgaatcctggacctgctatggccagccacaaagaaggagaggaccgtttctttcctttgtctggatctttaatttttggcaaacaaggaactggaagagacaacgtggatgcggacaaagtcatgataaccaacgaagaagaaattaaaactactaacccggtagcaacggagtcctatggacaagtggccacaaaccaccagagtgcccgggcacaggcgcagaccggctgggttcaaaaccaaggaatacttccgggtatggtttggcaggacagagatgtgtacctgcaaggacccatttgggccaaaattcctcacacggacggcaactttcacccttctccgctgatgggagggtttggaatgaagcacccgcctcctcagatcctcatcaaaaacacacctgtacctgcggatcctccaacggccttcaacaagggcaagctgaactctttcatcacccagtattctactggccaagtcagcgtggagatcgagtgggagctgcagaaggaaaacagcaagcgctggaacccggagatccagtacacttccaactattacaagtctaataatgttgaatttgctgttaatactgaaggtgtatatagtgaaccccgccccattggcaccagatacctgactcgtaatctg

SEQ ID NO: 848 - protein, 736 aa, synthetic construct
  REGION 1..736: note = Adeno Associated Virus Capsid Protein Variant
MAADGYLPDWLEDNLSEGIREWWALKPGAPQPKANQQHQDNARGLVLPGYKYLGPGNGLDKGEPVNAADAAALEHDKAYDQQLKAGDNPYLKYNHADAEFQERLKEDTSFGGNLGRAVFQAKKRLLEPLGLVEEAAKTAPGKKRPVEQSPQEPDSSAGIGKSGAQPAKKRLNFGQTGDTESVPDPQPIGEPPAAPSGVGSLTMASGGGAPVADNNEGADGVGSSSGNWHCDSQWLGDRVITTSTRTWALPTYNNHLYKQISNSTSGGSSNDNAFFGYSTPWGYFDFNRFHCHFSPRDWQRLINNNWGFRPKRLNFKLFNIQVKEVTDNNGVKTIANNLTSTVQVFTDSDYQLPYVLGSAHEGCLPPFPADVFMIPQYGYLTLNDGSQAVGRSSFYCLEYFPSQMLRTGNNFQFSYEFENVPFHSSYAHSQSLDRLMNPLIDQYLYYLSKTINGSGQGQQTLKFSVAGPSNMAVQGRNYIPGPSYRQQRVSTTVTFNNNSEFAWPGASSWALNGRNSLMNPGPAMASHKEGEDRFFPLSGSLIFGKQGTGRDNVDADKVMITNEEEIKTTNPVATESYGQVATNHQSARAQAQTGWVQNQGILPGMVWQDRDVYLQGPIWAKIPHTDGNFHPSPLMGGFGMKHPPPQILIKNTPVPADPPTAFNKGKLNSFITQYSTGQVSVEIEWELQKENSKRWNPEIQYTSNYYKSNNVEFAVNTEGVYSEPRPIGTRYLTRNL

SEQ ID NO: 849 - DNA, 2208 bp, synthetic construct
  misc_feature 1..2208: note = Adeno Associated Virus Capsid Protein Variant
  source 1..2208: mol_type = other DNA
atggctgccgatggttatcttccagattggctcgaggacaaccttagtgaaggaattcgcgagtggtgggctttgaaacctggagcccctcaacccaaggcaaatcaacaacatcaagacaacgctcgaggtcttgtgcttccgggttacaaataccttggacccggcaacggactcgacaagggggagccggtcaacgcagcagacgcggcggccctcgagcacgacaaggcctacgaccagcagctcaaggccggagacaacccgtacctcaagtacaaccacgccgacgccgagctccaggagcggctcaaagaagatacgtcttttgggggcaacctcgggcgagcagtcttccaggccaaaaagaggcttcttgaacctcttggtctggttgaggaagcggctaagacggctcctggaaagaagaggcctgtagagcagtctcctcaggaaccggactcctccgcgggtattggcaaatcgggtgcacagcccgctaaaaagagactcaatttcggtcagactggcgacacagagtcagtcccagaccctcaaccaatcggagaacctcccgcagccccctcaggtgtgggatctcttacaatggcttcaggtggtggcgcaccagtggcagacaataacgaaggtgccgatggagtgggtagttcctcgggaaattggcattgcgattcccaatggctgggggacagagtcatcaccaccagcacccgaacctgggccctgcccacctacaacaatcacctctacaagcaaatctccaacagcacatctggaggatcttcaaatgacaacgcctacttcggctacagcaccccctgggggtattttgacttcaacagattccactgccacttctcaccacgtgactggcagcgactcatcaacaacaactggggattccggcctaagcgactcaacttcaagctcttcaacattcaggtcaaagaggttacggacaacaatggagtcaagaccatcgccaataaccttaccagcacggtccaggtcttcacggactcagactatcagctcccgtacgtgctcgggtcggctcacgagggctgcctcccgccgttcccagcggacgttttcatgattcctcagtacgggtatctgacgcttaatgatggaagccaggccgtgggtcgttcgtccttttactgcctggaatatttcccgtcgcaaatgctaagaacgggtaacaacttccagttcagctacgagtttgagaacgtacctttccatagcagctacgctcacagccaaagcctggaccgactaatgaatccactcatcgaccaatacttgtactatctctcaaagactattaacggttctggacagggccaacaaacgctaaaattcagtgtggccggacccagcaacatggctgtccagggaagaaactacatacctggacccagctaccgacaacaacgtgtctcaaccactgtgacttttaacaacaacagcgaatttgcttggcctggagcttcttcttgggctctcaatggacgtaatagcttgatgaatcctggacctgctatggccagccacaaagaaggagaggaccgtttctttcctttgtctggatctttaatttttggcaaacaaggaactggaagagacaacgtggatgcggacaaagtcatgataaccaacgaagaagaaattaaaactactaacccggtagcaacggagtcctatggacaagtggccacaaaccaccagagtgcccgggcacaggcgcagaccggctgggttcaaaaccaaggaatacttccgggtatggtttggcaggacagagatgtgtacctgcaaggacccatttgggccaaaattcctcacacggacggcaactttcacccttctccgctgatgggagggtttggaatgaagcacccgcctcctcagatcctcatcaaaaacacacctgtacctgcggatcctccaacggccttcaacaagggcaagctgaactctttcatcacccagtattctactggccaagtcagcgtggagatcgagtgggagctgcagaaggaaaacagcaagcgctggaacccggagatccagtacacttccaactattacaagtctaataatgttgaatttgctgttaatactgaaggtgtatatagtgaaccccgccccattggcaccagatacctgactcgtaatctg

SEQ ID NO: 850 - protein, 736 aa, synthetic construct
  REGION 1..736: note = Adeno Associated Virus Capsid Protein Variant
MAADGYLPDWLEDNLSEGIREWWALKPGAPQPKANQQHQDNARGLVLPGYKYLGPGNGLDKGEPVNAADAAALEHDKAYDQQLKAGDNPYLKYNHADAELQERLKEDTSFGGNLGRAVFQAKKRLLEPLGLVEEAAKTAPGKKRPVEQSPQEPDSSAGIGKSGAQPAKKRLNFGQTGDTESVPDPQPIGEPPAAPSGVGSLTMASGGGAPVADNNEGADGVGSSSGNWHCDSQWLGDRVITTSTRTWALPTYNNHLYKQISNSTSGGSSNDNAYFGYSTPWGYFDFNRFHCHFSPRDWQRLINNNWGFRPKRLNFKLFNIQVKEVTDNNGVKTIANNLTSTVQVFTDSDYQLPYVLGSAHEGCLPPFPADVFMIPQYGYLTLNDGSQAVGRSSFYCLEYFPSQMLRTGNNFQFSYEFENVPFHSSYAHSQSLDRLMNPLIDQYLYYLSKTINGSGQGQQTLKFSVAGPSNMAVQGRNYIPGPSYRQQRVSTTVTFNNNSEFAWPGASSWALNGRNSLMNPGPAMASHKEGEDRFFPLSGSLIFGKQGTGRDNVDADKVMITNEEEIKTTNPVATESYGQVATNHQSARAQAQTGWVQNQGILPGMVWQDRDVYLQGPIWAKIPHTDGNFHPSPLMGGFGMKHPPPQILIKNTPVPADPPTAFNKGKLNSFITQYSTGQVSVEIEWELQKENSKRWNPEIQYTSNYYKSNNVEFAVNTEGVYSEPRPIGTRYLTRNL

SEQ ID NO: 851 - DNA, 2208 bp, synthetic construct
  misc_feature 1..2208: note = Adeno Associated Virus Capsid Protein Variant
  source 1..2208: mol_type = other DNA
atggctgccgatggttatcttccagattggctcgaggacaaccttagtgaaggaattcgcgagtggtgggctttgaaacctggagcccctcaaccccgcgcaaatcaacaacatcaagacaacgctcgaggtcttgtgcttccgggttacaaataccttggacccggcaacggactcgacaagggggagccggtcaacgcagcagacgcggcggccctcgagcacgacaaggcctacgaccagcagctcaaggccggagacaacccgtacctcaagtacaaccacgccgacgccgagttccaggagcggctcaaagaagatacgtcttttgggggcaacctcgggcgagcagtcttccaggccaaaaagaggcttcttgaacctcttggtctggttgaggaagcggctaagacggctcctggaaagaagaggcctgtagagcagtctcctcaggaaccggactcctccgcgggtattggcaaatcgggtgcacagcccgctaaaaagagactcaatttcggtcagactggcgacacagagtcagtcccagaccctcaaccaatcggagaacctcccgcagccccctcaggtgtgggatctcttacaatggcttcaggtggtggcgcaccagtggcagacaataacgaaggtgccgatggagtgggtagttcctcgggaaattggcattgcgattcccaatggctgggggacagagtcatcaccaccagcacccgaacctgggccctgcccacctacaacaatcacctctacaagcaaatctccaacagcacatctggaggatcttcaaatgacaacgcctacttcggctacagcaccccctgggggtattttgacttcaacagattccactgccacttctcaccacgtgactggcagcgactcatcaacaacaactggggattccggcctaagcgactcaacttcaagctcttcaacattcaggtcaaagaggttacggacaacaatggagtcaagaccatcgccaataaccttaccagcacggtccaggtcttcacggactcagactatcagctcccgtacgtgctcgggtcggctcacgagggctgcctcccgccgttcccagcggacgttttcatgattcctcagtacgggtatctgacgcttaatgatggaagccaggccgtgggtcgttcgtccttttactgcctggaatatttcccgtcgcaaatgctaagaacgggtaacaacttccagttcagctacgagtttgagaacgtacctttccatagcagctacgctcacagccaaagcctggaccgactaatgaatccactcatcgaccaatacttgtactatctctcaaagactattaacggttctggacagggccaacaaacgctaaaattcagtgtggccggacccagcaacatggctgtccagggaagaaactacatacctggacccagctaccgacaacaacgtgtctcaaccactgtgacttttaacaacaacagcgaatttgcttggcctggagcttcttcttgggctctcaatggacgtaatagcttgatgaatcctggacctgctatggccagccacaaagaaggagaggaccgtttctttcctttgtctggatctttaatttttggcaaacaaggaactggaagagacaacgtggatgcggacaaagtcatgataaccaacgaagaagaaattaaaactactaacccggtagcaacggagtactatggacaagtggccacaaaccaccagagtgcccgggcacaggcgcagaccggctgggttcaaaaccaaggaatacttccgggtatggtttggcaggacagagatgtgtacctgcaaggacccatttgggccaaaattcctcacacggacggcaactttcacccttctccgctgatgggagggtttggaatgaagcacccgcctcctcagatcctcatcaaaaacacacctgtacctgcggatcctccaacggccttcaacaagggcaagctgaactctttcatcacccagtattctactggccaagtcagcgtggagatcgagtgggagctgcagaaggaaaacagcaagcgctggaacccggagatccagtacacttccaactattacaagtctaataatgttgaatttgctgttaatactgaaggtgtatatagtgaaccccgccccattggcaccagatacctgactcgtaatctg

SEQ ID NO: 852 - protein, 736 aa, synthetic construct
  REGION 1..736: note = Adeno Associated Virus Capsid Protein Variant
MAADGYLPDWLEDNLSEGIREWWALKPGAPQPRANQQHQDNARGLVLPGYKYLGPGNGLDKGEPVNAADAAALEHDKAYDQQLKAGDNPYLKYNHADAEFQERLKEDTSFGGNLGRAVFQAKKRLLEPLGLVEEAAKTAPGKKRPVEQSPQEPDSSAGIGKSGAQPAKKRLNFGQTGDTESVPDPQPIGEPPAAPSGVGSLTMASGGGAPVADNNEGADGVGSSSGNWHCDSQWLGDRVITTSTRTWALPTYNNHLYKQISNSTSGGSSNDNAYFGYSTPWGYFDFNRFHCHFSPRDWQRLINNNWGFRPKRLNFKLFNIQVKEVTDNNGVKTIANNLTSTVQVFTDSDYQLPYVLGSAHEGCLPPFPADVFMIPQYGYLTLNDGSQAVGRSSFYCLEYFPSQMLRTGNNFQFSYEFENVPFHSSYAHSQSLDRLMNPLIDQYLYYLSKTINGSGQGQQTLKFSVAGPSNMAVQGRNYIPGPSYRQQRVSTTVTFNNNSEFAWPGASSWALNGRNSLMNPGPAMASHKEGEDRFFPLSGSLIFGKQGTGRDNVDADKVMITNEEEIKTTNPVATEYYGQVATNHQSARAQAQTGWVQNQGILPGMVWQDRDVYLQGPIWAKIPHTDGNFHPSPLMGGFGMKHPPPQILIKNTPVPADPPTAFNKGKLNSFITQYSTGQVSVEIEWELQKENSKRWNPEIQYTSNYYKSNNVEFAVNTEGVYSEPRPIGTRYLTRNL

SEQ ID NO: 853 - DNA, 2208 bp, synthetic construct
  misc_feature 1..2208: note = Adeno Associated Virus Capsid Protein Variant
  source 1..2208: mol_type = other DNA
atggctgccgatggttatcttccagattggctcgaggacaaccttagtgaaggaattcgcgagtggtgggctttgaaacctggagcccctcaacccaaggcaaatcaacaacatcaagacaacgctcgaggtcttgtgcttccgggttacaaataccttggacccggcaacggactcgacaagggggagccggtcaacgcagcagacgcggcggccctcgagcacgacaaggcctacgaccagcagctcaaggccggagacaacccgtacctcaagtacaaccacgccgacgccgagttccaggagcggctcaaagaagatacgtcttttgggggcaacctcgggcgagcagtcttccaggccaaaaagaggcttcttgaacctcttggtctggttgaggaagcggctaagacggctcctggaaagaagaggcctgtagagcagtctcctcaggaaccggactcctccgcgggtattggcaaatcgggtgcacagcccgctaaaaagagactcaatttcggtcagactggcgacacagagtcagtcccagaccctcaaccaatcggagaacctcccgcagccccctcaggtgtgggatctcttacaatggcttcaggtggtggcgcaccagtggcagacaataacgaaggtgccgatggagtgggtagttcctcgggaaattggcattgcgattcccaatggctgggggacagagtcatcaccaccagcacccgaacctgggccctgcccacctacaacaatcacctctacaagcaaatctccaacagcacatctggaggatcttcaaatgacaacgcctacttcggctacagcaccccctgggggtattttgacttcaacagattccactgccacttctcaccacgtgactggcagcgactcatcaacaacaactggggattccggcctaagcgactcaacttcaagctcttcaacattcaggtcaaagaggttacggacaacaatggagtcaagaccatcgccaataaccttaccagcacggtccaggtcttcacggactcagactatcagctcccgtacgtgctcgggtcggctcacgagggctgcctcccgccgttcccagcggacgttttcatgattcctcagtacgggtatctgacgcttaatgatggaagccaggccgtgggtcgttcgtccttttactgcctggaatatttcccgtcgcaaatgctaagaacgggtaacaacttccagttcagctacgagtttgagaacgtacctttccatagcagctacgctcacagccaaagcctggaccgactaatgaatccactcatcgaccaatacttgtactatctctcaaagactattaacggttctggacagggccaacaaacgctaaaattcagtactgccggacccagcaacatggctgtccagggaagaaactacatacctggacccagctaccgacaacaacgtgtctcaaccactgtgacttttaacaacaacagcgaatttgcttggcctggagcttcttcttgggctctcaatggacgtaatagcttgatgaatcctggacctgctatggccagccacaaagaaggagaggaccgtttctttcctttgtctggatctttaatttttggcaaacaaggaactggaagagacaacgtggatgcggacaaagtcatgataaccaacgaagaagaaattaaaactactaacccggtagcaacggagtcctatggacaagtggccacaaaccaccagagtgcccgggcacaggcgcagaccggctgggttcaaaaccaaggaatacttccgggtatggtttggcaggacagagatgtgtacctgcaaggacccatttgggccaaaattcctcacacggacggcaactttcacccttctccgctgatgggagggtttggaatgaagcacccgcctcctcagatcctcatcaaaaacacacctgtacctgcggatcctccaacggccttcaacaagggcaagctgaactctttcatcacccagtattctactggccaagtcagcgtggagatcgagtgggagctgcagaaggaaaacagcaagcgctggaacccggagatccagtacacttccaactattacaagtctaataatgttgaatttgctgttaatactgaaggtgtatatagtgaaccccgccccattggcaccagatacctgactcgtaatctg

SEQ ID NO: 854 - protein, 736 aa, synthetic construct
  REGION 1..736: note = Adeno Associated Virus Capsid Protein Variant
MAADGYLPDWLEDNLSEGIREWWALKPGAPQPKANQQHQDNARGLVLPGYKYLGPGNGLDKGEPVNAADAAALEHDKAYDQQLKAGDNPYLKYNHADAEFQERLKEDTSFGGNLGRAVFQAKKRLLEPLGLVEEAAKTAPGKKRPVEQSPQEPDSSAGIGKSGAQPAKKRLNFGQTGDTESVPDPQPIGEPPAAPSGVGSLTMASGGGAPVADNNEGADGVGSSSGNWHCDSQWLGDRVITTSTRTWALPTYNNHLYKQISNSTSGGSSNDNAYFGYSTPWGYFDFNRFHCHFSPRDWQRLINNNWGFRPKRLNFKLFNIQVKEVTDNNGVKTIANNLTSTVQVFTDSDYQLPYVLGSAHEGCLPPFPADVFMIPQYGYLTLNDGSQAVGRSSFYCLEYFPSQMLRTGNNFQFSYEFENVPFHSSYAHSQSLDRLMNPLIDQYLYYLSKTINGSGQGQQTLKFSTAGPSNMAVQGRNYIPGPSYRQQRVSTTVTFNNNSEFAWPGASSWALNGRNSLMNPGPAMASHKEGEDRFFPLSGSLIFGKQGTGRDNVDADKVMITNEEEIKTTNPVATESYGQVATNHQSARAQAQTGWVQNQGILPGMVWQDRDVYLQGPIWAKIPHTDGNFHPSPLMGGFGMKHPPPQILIKNTPVPADPPTAFNKGKLNSFITQYSTGQVSVEIEWELQKENSKRWNPEIQYTSNYYKSNNVEFAVNTEGVYSEPRPIGTRYLTRNL

SEQ ID NO: 855 - DNA, 2208 bp, synthetic construct
  misc_feature 1..2208: note = Adeno Associated Virus Capsid Protein Variant
  source 1..2208: mol_type = other DNA
atggctgccgatggttatcttccagattggctcgaggacaaccttagtgaaggaattcgcgagtggtgggctttgaaacctggagcccctcaacccaaggcaaatcaacaacatcaagacaacgctcgaggtcttgtgcttccgggttacaaataccttggacccggcaacggactcgacaagggggagccggtcaacgcagcagacgcggcggccctcgagcacgacaaggcctacgaccagcagctcaaggccggagacaacccgtacctcaagtacaaccacgccgacgccgagttccaggagcggctcaaagaagatacgtcttttgggggcaacctcgggcgagcagtcttccaggccaaaaagaggcttcttgaacctcttggtctggttgaggaagcggctaagacggctcctggaaagaagaggcctgtagagcagtctcctcaggaaccggactcctccgcgggtattggcaaatcgggtgcacagcccgctaaaaagagactcaatttcggtcagactggcgacacagagtcagtcccagaccctcaaccaatcggagaacctcccgcagccccctcaggtgtgggatctcttacaatggcttcaggtggtggcgcaccagtggcagacaataacgaaggtgccgatggagtgggtagttcctcgggaaattggcattgcgattcccaatggctgggggacagagtcatcaccaccagcacccgaacctgggccctgcccacctacaacaatcacctctacaagcaaatctccaacagcacatctggaggatcttcaaatgacaacgcctacttcggctacagcaccccctgggggtattttgacttcaacagattccactgccacttctcaccacgtgactggcagcgactcatcaacaacaactggggattccggcctaagcgactcaacttcaagctcttcaacattcaggtcaaagaggttacggacaacaatggagtcaagaccatcgccaataaccttaccagcacggtccaggtcttcacggactcagactatcagctcccgtacgtgctcgggtcggctcacgagggctgcctcccgccgttcccagcggacgttttcatgattcctcagtacgggtatctgacgcttaatgatggaagccaggccgtgggtcgttcgtccttttactgcctggaatatttcccgtcgcaaatgctaagaacgggtaacaacttccagttcagctacgagtttgagaacgtacctttccatagcagctacgctcacagccaaagcctggaccgactaatgaatccactcatcgaccaatacttgtactatctctcaaagactattaacggttctggacagggccaacaaacgctaaaattcagtgtggccggacaaagcaacatggctgtccagggaagaaactacatacctggacccagctaccgacaacaacgtgtctcaaccactgtgacttttaacaacaacagcgaatttgcttggcctggagcttcttcttgggctctcaatggacgtaatagcttgatgaatcctggacctgctatggccagccacaaagaaggagaggaccgtttctttcctttgtctggatctttaatttttggcaaacaaggaactggaagagacaacgtggatgcggacaaagtcatgataaccaacgaagaagaaattaaaactactaacccggtagcaacggagtcctatggacaagtggccacaaaccaccagagtgcccgggcacaggcgcagaccggctgggttcaaaaccaaggaatacttccgggtatggtttggcaggacagagatgtgtacctgcaaggacccatttgggccaaaattcctcacacggacggcaactttcacccttctccgctgatgggagggtttggaatgaagcacccgcctcctcagatcctcatcaaaaacacacctgtacctgcggatcctccaacggccttcaacaagggcaagctgaactctttcatcacccagtattctactggccaagtcagcgtggagatcgagtgggagctgcagaaggaaaacagcaagcgctggaacccggagatccagtacacttccaactattacaagtctaataatgttgaatttgctgttaatactgaaggtgtatatagtgaaccccgccccattggcaccagatacctgactcgtaatctg

SEQ ID NO: 856 - protein, 736 aa, synthetic construct
  REGION 1..736: note = Adeno Associated Virus Capsid Protein Variant
MAADGYLPDWLEDNLSEGIREWWALKPGAPQPKANQQHQDNARGLVLPGYKYLGPGNGLDKGEPVNAADAAALEHDKAYDQQLKAGDNPYLKYNHADAEFQERLKEDTSFGGNLGRAVFQAKKRLLEPLGLVEEAAKTAPGKKRPVEQSPQEPDSSAGIGKSGAQPAKKRLNFGQTGDTESVPDPQPIGEPPAAPSGVGSLTMASGGGAPVADNNEGADGVGSSSGNWHCDSQWLGDRVITTSTRTWALPTYNNHLYKQISNSTSGGSSNDNAYFGYSTPWGYFDFNRFHCHFSPRDWQRLINNNWGFRPKRLNFKLFNIQVKEVTDNNGVKTIANNLTSTVQVFTDSDYQLPYVLGSAHEGCLPPFPADVFMIPQYGYLTLNDGSQAVGRSSFYCLEYFPSQMLRTGNNFQFSYEFENVPFHSSYAHSQSLDRLMNPLIDQYLYYLSKTINGSGQGQQTLKFSVAGQSNMAVQGRNYIPGPSYRQQRVSTTVTFNNNSEFAWPGASSWALNGRNSLMNPGPAMASHKEGEDRFFPLSGSLIFGKQGTGRDNVDADKVMITNEEEIKTTNPVATESYGQVATNHQSARAQAQTGWVQNQGILPGMVWQDRDVYLQGPIWAKIPHTDGNFHPSPLMGGFGMKHPPPQILIKNTPVPADPPTAFNKGKLNSFITQYSTGQVSVEIEWELQKENSKRWNPEIQYTSNYYKSNNVEFAVNTEGVYSEPRPIGTRYLTRNL

SEQ ID NO: 857 - DNA, 2208 bp, synthetic construct
  misc_feature 1..2208: note = Adeno Associated Virus Capsid Protein Variant
  source 1..2208: mol_type = other DNA
atggctgccgatggttatcttccagattggctcgaggacaaccttagtgaaggaattcgcgagtggtgggctttgaaacctggagcccctcaacccaaggcaaatcaacaacatcaagacaacgctcgaggtcttgtgcttccgggttacaaataccttggacccggcaacggactcgacaagggggagccggtcaacgcagcagacgcggcggccctcgagcacgacaaggcctacgaccagcagctcaaggccggagacaacccgtacctcaagtacaaccacgccgacgccgagttccaggagcggctcaaagaagatacgtcttttgggggcaacctcgggcgagcagtcttccaggccaaaaagaggcttcttgaacctcttggtctggttgaggaagcggctaagacggctcctggaaagaagaggcctgtagagcagtctcctcaggaaccggactcctccgcgggtattggcaaatcgggtgcacagcccgctaaaaagagactcaatttcggtcagactggcgacacagagtcagtcccagaccctcaaccaatcggagaacctcccgcagccccctcaggtgtgggatctcttacaatggcttcaggtggtggcgcaccagtggcagacaataacgaaggtgccgatggagtgggtagttcctcgggaaattggcattgcgattcccaatggctgggggacagagtcatcaccaccagcacccgaacctgggccctgcccacctacaacaatcacctctacaagcaaatctccaacagcacatctggaggatcttcaaatgacaacgcctacttcggctacagcaccccctgggggtattttgacttcaacagattccactgccacttctcaccacgtgactggcagcgactcatcaacaacaactggggattccggcctaagcgactcaacttcaagctcttcaacattcaggtcaaagaggttacggacaacaatggagtcaagaccatcgccaataaccttaccagcacggtccaggtcttcacggactcagactatcagctcccgtacgtgctcgggtcggctcacgagggctgcctcccgccgttcccagcggacgttttcatgattcctcagtacgggtatctgacgcttaatgatggaagccaggccgtgggtcgttcgtccttttactgcctggaatatttcccgtcgcaaatgctaagaacgggtaacaacttccagttcagctacgagtttgagaacgtacctttccatagcagctacgctcacagccaaagcctggaccgactaatgaatccactcatcgaccaatacttgtactatctctcaaagactattaacggttctggacagggccaacaaacgctaaaattcagtgtggccggacccagcaacatggctgtccagggaagaaactacatacctggacccagctaccgacaacaacgtgtctcaaccactgtgacttttaacaacaacagcgaatttgcttggcctggagcttcttcttgggctctcaatggacgtaatagcttgatgaatcctggacctgctatggccagccacaaagaaggagaggaccgtttctttcctttgtctggatctttaatttttggcaaacaaggaactggaagagacaacgtggatgcggacaaagtcatgataaccaacgaagaagaaattaaaactactaacccggtagcaacggagtcctatggacaagtggccacaaaccaccagagtgcccgggcacaggcgcagacccaatgggttcaaaaccaaggaatacttccgggtatggtttggcaggacagagatgtgtacctgcaaggacccatttgggccaaaattcctcacacggacggcaactttcacccttctccgctgatgggagggtttggaatgaagcacccgcctcctcagatcctcatcaaaaacacacctgtacctgcggatcctccaacggccttcaacaagggcaagctgaactctttcatcacccagtattctactggccaagtcagcgtggagatcgagtgggagctgcagaaggaaaacagcaagcgctggaacccggagatccagtacacttccaactattacaagtctaataatgttgaatttgctgttaatactgaaggtgtatatagtgaaccccgccccattggcaccagatacctgactcgtaatctg

SEQ ID NO: 858 - protein, 736 aa, synthetic construct
  REGION 1..736: note = Adeno Associated Virus Capsid Protein Variant
MAADGYLPDWLEDNLSEGIREWWALKPGAPQPKANQQHQDNARGLVLPGYKYLGPGNGLDKGEPVNAADAAALEHDKAYDQQLKAGDNPYLKYNHADAEFQERLKEDTSFGGNLGRAVFQAKKRLLEPLGLVEEAAKTAPGKKRPVEQSPQEPDSSAGIGKSGAQPAKKRLNFGQTGDTESVPDPQPIGEPPAAPSGVGSLTMASGGGAPVADNNEGADGVGSSSGNWHCDSQWLGDRVITTSTRTWALPTYNNHLYKQISNSTSGGSSNDNAYFGYSTPWGYFDFNRFHCHFSPRDWQRLINNNWGFRPKRLNFKLFNIQVKEVTDNNGVKTIANNLTSTVQVFTDSDYQLPYVLGSAHEGCLPPFPADVFMIPQYGYLTLNDGSQAVGRSSFYCLEYFPSQMLRTGNNFQFSYEFENVPFHSSYAHSQSLDRLMNPLIDQYLYYLSKTINGSGQGQQTLKFSVAGPSNMAVQGRNYIPGPSYRQQRVSTTVTFNNNSEFAWPGASSWALNGRNSLMNPGPAMASHKEGEDRFFPLSGSLIFGKQGTGRDNVDADKVMITNEEEIKTTNPVATESYGQVATNHQSARAQAQTQWVQNQGILPGMVWQDRDVYLQGPIWAKIPHTDGNFHPSPLMGGFGMKHPPPQILIKNTPVPADPPTAFNKGKLNSFITQYSTGQVSVEIEWELQKENSKRWNPEIQYTSNYYKSNNVEFAVNTEGVYSEPRPIGTRYLTRNL

SEQ ID NO: 859 - DNA, 2208 bp, synthetic construct
  misc_feature 1..2208: note = Adeno Associated Virus Capsid Protein Variant
  source 1..2208: mol_type = other DNA
atggctgccgatggttatcttccagattggctcgaggacaaccttagtgaaggaattcgcgagtggtgggctttgaaacctggagcccctcaacccaaggcaaatcaacaacatcaagacaacgctcgaggtcttgtgcttccgggttacaaataccttggacccggcaacggactcgacaagggggagccggtcaacgcagcagacgcggcggccctcgagcacgacaaggcctacgaccagcagctcaaggccggagacaacccgtacctcaagtacaaccacgccgacgccgagttccaggagcggctcaaagaagatacgtcttttgggggcaacctcgggcgagcagtcttccaggccaaaaagaggcttcttgaacctcttggtctggttgaggaagcggctaagacggctcctggaaagaagaggcctgtagagcagtctcctcaggaaccggactcctccgcgggtattggcaaatcgggtgcacagcccgctaaaaagagactcaatttcggtcagactggcgacacagagtcagtcccagaccctcaaccaatcggagaacctcccgcagccccctcaggtgtgggatctcttacaatggcttcaggtggtggcgcaccagtggcagacaataacgaaggtgccgatggagtgggtagttcctcgggaaattggcattgcgattcccaatggctgggggacagagtcatcaccaccagcacccgaacctgggccctgcccacctacaacaatcacctctacaagcaaatctccaacagcacatctggaggatcttcaaatgacaacgcctacttcggctacagcaccccctgggggtattttgacttcaacagattccactgccacttctcaccacgtgactggcagcgactcatcaacaacaactggggattccggcctaagcgactcaacttcaagctcttcaacattcaggtcaaagaggttacggacaacaatggagtcaagaccatcgccaataaccttaccagcacggtccaggtcttcacggactcagactatcagctcccgtacgtgctcgggtcggctcacgagggctgcctcccgccgttcccagcggacgttttcatgattcctcagtacgggtatctgacgcttaatgatggaagccaggccgtgggtcgttcgtccttttactgcctggaatatttcccgtcgcaaatgctaagaacgggtaacaacttccagttcagctacgagtttgagaacgtacctttccatagcagctacgctcacagccaaagcctggaccgactaatgaatccactcatcgaccaatacttgtactatctctcaaagactattaacggttctggacagggccaacaaacgctaaaattcagtgtggccggacccagcaacatggctgtccagggaagaaactacatacctggacccagctaccgacaacaacgtgtctcaaccactgtgacttttaacaacaacagcgaatttgcttggcctggagcttcttcttgggctctcaatggacgtaatagcttgatgaatcctggacctgctatggccagccacaaagaaggagaggaccgtttctttcctttgtctggatctttaatttttggcaaacaaggaactggaagagacaacgtggatgcggacaaagtcatgataaccaacgaagaagaaattaaaactactaacccggtagcaacggagtcctatggacaagtggccacaaaccaccagagtgcccgggcacaggcgcagaccagttgggttcaaaaccaaggaatacttccgggtatggtttggcaggacagagatgtgtacctgcaaggacccatttgggccaaaattcctcacacggacggcaactttcacccttctccgctgatgggagggtttggaatgaagcacccgcctcctcagatcctcatcaaaaacacacctgtacctgcggatcctccaacggccttcaacaagggcaagctgaactctttcatcacccagtattctactggccaagtcagcgtggagatcgagtgggagctgcagaaggaaaacagcaagcgctggaacccggagatccagtacacttccaactattacaagtctaataatgttgaatttgctgttaatactgaaggtgtatatagtgaaccccgccccattggcaccagatacctgactcgtaatctg

SEQ ID NO: 860 - protein, 736 aa, synthetic construct
  REGION 1..736: note = Adeno Associated Virus Capsid Protein Variant
MAADGYLPDWLEDNLSEGIREWWALKPGAPQPKANQQHQDNARGLVLPGYKYLGPGNGLDKGEPVNAADAAALEHDKAYDQQLKAGDNPYLKYNHADAEFQERLKEDTSFGGNLGRAVFQAKKRLLEPLGLVEEAAKTAPGKKRPVEQSPQEPDSSAGIGKSGAQPAKKRLNFGQTGDTESVPDPQPIGEPPAAPSGVGSLTMASGGGAPVADNNEGADGVGSSSGNWHCDSQWLGDRVITTSTRTWALPTYNNHLYKQISNSTSGGSSNDNAYFGYSTPWGYFDFNRFHCHFSPRDWQRLINNNWGFRPKRLNFKLFNIQVKEVTDNNGVKTIANNLTSTVQVFTDSDYQLPYVLGSAHEGCLPPFPADVFMIPQYGYLTLNDGSQAVGRSSFYCLEYFPSQMLRTGNNFQFSYEFENVPFHSSYAHSQSLDRLMNPLIDQYLYYLSKTINGSGQGQQTLKFSVAGPSNMAVQGRNYIPGPSYRQQRVSTTVTFNNNSEFAWPGASSWALNGRNSLMNPGPAMASHKEGEDRFFPLSGSLIFGKQGTGRDNVDADKVMITNEEEIKTTNPVATESYGQVATNHQSARAQAQTSWVQNQGILPGMVWQDRDVYLQGPIWAKIPHTDGNFHPSPLMGGFGMKHPPPQILIKNTPVPADPPTAFNKGKLNSFITQYSTGQVSVEIEWELQKENSKRWNPEIQYTSNYYKSNNVEFAVNTEGVYSEPRPIGTRYLTRNL

SEQ ID NO: 861 - DNA, 2208 bp, synthetic construct
  misc_feature 1..2208: note = Adeno Associated Virus Capsid Protein Variant
  source 1..2208: mol_type = other DNA
atggctgccgatggttatcttccagattggctcgaggacaaccttagtgaaggaattcgcgagtggtgggctttgaaacctggagcccctcaacccaaggcaaatcaacaacatcaagacaacgctcgaggtcttgtgcttccgggttacaaataccttggacccggcaacggactcgacaagggggagccggtcaacgcagcagacgcggcggccctcgagcacgacaaggcctacgaccagcagctcaaggccggagacaacccgtacctcaagtacaaccacgccgacgccgagttccaggagcggctcaaagaagatacgtcttttgggggcaacctcgggcgagcagtcttccaggccaaaaagaggcttcttgaacctcttggtctggttgaggaagcggctaagacggctcctggaaagaagaggcctgtagagcagtctcctcaggaaccggactcctccgcgggtattggcaaatcgggtgcacagcccgctaaaaagagactcaatttcggtcagactggcgacacagagtcagtcccagaccctcaaccaatcggagaacctcccgcagccccctcaggtgtgggatctcttacaatggcttcaggtggtggcgcaccagtggcagacaataacgaaggtgccgatggagtgggtagttcctcgggaaattggcattgcgattcccaatggctgggggacagagtcatcaccaccagcacccgaacctgggccctgcccacctacaacaatcacctctacaagcaaatctccaacagcacatctggaggatcttcaaatgacaacgcctacttcggctacagcaccccctgggggtattttgacttcaacagattccactgccacttctcaccacgtgactggcagcgactcatcaacaacaactggggattccggcctaagcgactcaacttcaagctcttcaacattcaggtcaaagaggttacggacaacaatggagtcaagaatatcgccaataaccttaccagcacggtccaggtcttcacggactcagactatcagctcccgtacgtgctcgggtcggctcacgagggctgcctcccgccgttcccagcggacgttttcatgattcctcagtacgggtatctgacgcttaatgatggaagccaggccgtgggtcgttcgtccttttactgcctggaatatttcccgtcgcaaatgctaagaacgggtaacaacttccagttcagctacgagtttgagaacgtacctttccatagcagctacgctcacagccaaagcctggaccgactaatgaatccactcatcgaccaatacttgtactatctctcaaagactattaacggttctggacagggccaacaaacgctaaaattcagtgtggccggacccagcaacatggctgtccagggaagaaactacatacctggacccagctaccgacaacaacgtgtctcaaccactgtgacttttaacaacaacagcgaatttgcttggcctggagcttcttcttgggctctcaatggacgtaatagcttgatgaatcctggacctgctatggccagccacaaagaaggagaggaccgtttctttcctttgtctggatctttaatttttggcaaacaaggaactggaagagacaacgtggatgcggacaaagtcatgataaccaacgaagaagaaattaaaactactaacccggtagcaacggagtcctatggacaagtggccacaaaccaccagagtgcccgggcacaggcgcagaccggctgggttcaaaaccaaggaatacttccgggtatggtttggcaggacagagatgtgtacctgcaaggacccatttgggccaaaattcctcacacggacggcaactttcacccttctccgctgatgggagggtttggaatgaagcacccgcctcctcagatcctcatcaaaaacacacctgtacctgcggatcctccaacggccttcaacaagggcaagctgaactctttcatcacccagtattctactggccaagtcagcgtggagatcgagtgggagctgcagaaggaaaacagcaagcgctggaacccggagatccagtacacttccaactattacaagtctaataatgttgaatttgctgttaatactgaaggtgtatatagtgaaccccgccccattggcaccagatacctgactcgtaatctg

SEQ ID NO: 862 - protein, 736 aa, synthetic construct
  REGION 1..736: note = Adeno Associated Virus Capsid Protein Variant
MAADGYLPDWLEDNLSEGIREWWALKPGAPQPKANQQHQDNARGLVLPGYKYLGPGNGLDKGEPVNAADAAALEHDKAYDQQLKAGDNPYLKYNHADAEFQERLKEDTSFGGNLGRAVFQAKKRLLEPLGLVEEAAKTAPGKKRPVEQSPQEPDSSAGIGKSGAQPAKKRLNFGQTGDTESVPDPQPIGEPPAAPSGVGSLTMASGGGAPVADNNEGADGVGSSSGNWHCDSQWLGDRVITTSTRTWALPTYNNHLYKQISNSTSGGSSNDNAYFGYSTPWGYFDFNRFHCHFSPRDWQRLINNNWGFRPKRLNFKLFNIQVKEVTDNNGVKNIANNLTSTVQVFTDSDYQLPYVLGSAHEGCLPPFPADVFMIPQYGYLTLNDGSQAVGRSSFYCLEYFPSQMLRTGNNFQFSYEFENVPFHSSYAHSQSLDRLMNPLIDQYLYYLSKTINGSGQGQQTLKFSVAGPSNMAVQGRNYIPGPSYRQQRVSTTVTFNNNSEFAWPGASSWALNGRNSLMNPGPAMASHKEGEDRFFPLSGSLIFGKQGTGRDNVDADKVMITNEEEIKTTNPVATESYGQVATNHQSARAQAQTGWVQNQGILPGMVWQDRDVYLQGPIWAKIPHTDGNFHPSPLMGGFGMKHPPPQILIKNTPVPADPPTAFNKGKLNSFITQYSTGQVSVEIEWELQKENSKRWNPEIQYTSNYYKSNNVEFAVNTEGVYSEPRPIGTRYLTRNL

SEQ ID NO: 863 - DNA, 2208 bp, synthetic construct
  misc_feature 1..2208: note = Adeno Associated Virus Capsid Protein Variant
  source 1..2208: mol_type = other DNA
atggctgccgatggttatcttccagattggctcgaggacaaccttagtgaaggaattcgcgagtggtgggctttgaaacctggagcccctcaacccaaggcaaatcaacaacatcaagacaacgctcgaggtcttgtgcttccgggttacaaataccttggacccggcaacggactcgacaagggggagccggtcaacgcagcagacgcggcggccctcgagcacgacaaggcctacgaccagcagctcaaggccggagacaacccgtacctcaagtacaaccacgccgacgccgagttccaggagcggctcaaagaagatacgtcttttgggggcaacctcgggcgagcagtcttccaggccaaaaagaggcttcttgaacctcttggtctggttgaggaagcggctaagacggctcctggaaagaagaggcctgtagagcagtctcctcaggaaccggactcctccgcgggtattggcaaatcgggtgcacagcccgctaaaaagagactcaatttcggtcagactggcgacacagagtcagtcccagaccctcaaccaatcggagaacctcccgcagccccctcaggtgtgggatctcttacaatggcttcaggtggtggcgcaccagtggcagacaataacgaaggtgccgatggagtgggtagttcctcgggaaattggcattgcgattcccaatggctgggggacagagtcatcaccaccagcacccgaacctgggccctgcccacctacaacaatcacctctacaagcaaatatccaacagcacatctggaggatcttcaaatgacaacgcctacttcggctacagcaccccctgggggtattttgacttcaacagattccactgccacttctcaccacgtgactggcagcgactcatcaacaacaactggggattccggcctaagcgactcaacttcaagctcttcaacattcaggtcaaagaggttacggacaacaatggagtcaagaccatcgccaataaccttaccagcacggtccaggtcttcacggactcagactatcagctcccgtacgtgctcgggtcggctcacgagggctgcctcccgccgttcccagcggacgttttcatgattcctcagtacgggtatctgacgcttaatgatggaagccaggccgtgggtcgttcgtccttttactgcctggaatatttcccgtcgcaaatgctaagaacgggtaacaacttccagttcagctacgagtttgagaacgtacctttccatagcagctacgctcacagccaaagcctggaccgactaatgaatccactcatcgaccaatacttgtactatctctcaaagactattaacggttctggacagggccaacaaacgctaaaattcagtgtggccggacccagcaacatggctgtccagggaagaaactacatacctggacccagctaccgacaacaacgtgtctcaaccactgtgacttttaacaacaacagcgaatttgcttggcctggagcttcttcttgggctctcaatggacgtaatagcttgatgaatcctggacctgctatggccagccacaaagaaggagaggaccgtttctttcctttgtctggatctttaatttttggcaaacaaggaactggaagagacaacgtggatgcggacaaagtcatgataaccaacgaagaagaaattaaaactactaacccggtagcaacggagtcctatggacaagtggccacaaaccaccagagtgcccgggcacaggcgcagaccggctgggttcaaaaccaaggaatacttccgggtatggtttggcaggacagagatgtgtacctgcaaggacccatttgggccaaaattcctcacacggacggcaactttcacccttctccgctgatgggagggtttggaatgaagcacccgcctcctcagatcctcatcaaaaacacacctgtacctgcggatcctccaacggccttcaacaagggcaagctgaactctttcatcacccagtattctactggccaagtcagcgtggagatcgagtgggagctgcagaaggaaaacagcaagcgctggaacccggagatccagtacacttccaactattacaagtctaataatgttgaatttgctgttaatactgaaggtgtatatagtgaaccccgccccattggcaccagatacctgactcgtaatctg

SEQ ID NO: 864 - protein, 736 aa, synthetic construct; identical to SEQ ID NO: 552
  REGION 1..736: note = Adeno Associated Virus Capsid Protein Variant

SEQ ID NO: 865 - DNA, 2208 bp, synthetic construct
  misc_feature 1..2208: note = Adeno Associated Virus Capsid Protein Variant
  source 1..2208: mol_type = other DNA
atggctgccgatggttatcttccagattggctcgaggacaaccttagtgaaggaattcgcgagtggtgggctttgaaacctggagcccctcaacccaaggcaaatcaacaacatcaagacaacgctcgaggtcttgtgcttccgggttacaaataccttggacccggcaacggactcgacaagggggagccggtcaacgcagcagacgcggcggccctcgagcacgacaaggcctacgaccagcagctcaaggccggagacaacccgtacctcaagtacaaccacgccgacgccgagttccaggagcggctcaaagaagatacgtcttttgggggcaacctcgggcgagcagtcttccaggccaaaaagaggcttcttgaacctcttggtctggttgaggaagcggctaagacggctcctggaaagaagaggcctgtagagcagtctcctcaggaaccggactcctccgcgggtattggcaaatcgggtgcacagcccgctaaaaagagactcaatttcggtcagactggcgacacagagtcagtcccagaccctcaaccaatcggagaacctcccgcagccccctcaggtgtgggatctcttacaatggcttcaggtggtggcgcaccagtggcagacaataacgaaggtgccgatggagtgggtagttcctcgggaaattggcattgcgattcccaatggctgggggacagagtcatcaccaccagcacccgaacctgggccctgcccacctacaacaatcacctctacaagcaaatctccaacagcacatctggaggatcttcaaatgacaacgcctacttcggctacagcaccccctgggggtattttgacttcaacagattccactgccacttctcaccacgtgactggcagcgactcatcaacaacaactggggattccggcctaagcgactcaacttcaagctcttcaacattcaggtcaaagaggttacggacaacaatggaacaaagaccatcgccaataaccttaccagcacggtccaggtcttcacggactcagactatcagctcccgtacgtgctcgggtcggctcacgagggctgcctcccgccgttcccagcggacgttttcatgattcctcagtacgggtatctgacgcttaatgatggaagccaggccgtgggtcgttcgtccttttactgcctggaatatttcccgtcgcaaatgctaagaacgggtaacaacttccagttcagctacgagtttgagaacgtacctttccatagcagctacgctcacagccaaagcctggaccgactaatgaatccactcatcgaccaatacttgtactatctctcaaagactattaacggttctggacagggccaacaaacgctaaaattcagtgtggccggacccagcaacatggctgtccagggaagaaactacatacctggacccagctaccgacaacaacgtgtctcaaccactgtgacttttaacaacaacagcgaatttgcttggcctggagcttcttcttgggctctcaatggacgtaatagcttgatgaatcctggacctgctatggccagccacaaagaaggagaggaccgtttctttcctttgtctggatctttaatttttggcaaacaaggaactggaagagacaacgtggatgcggacaaagtcatgataaccaacgaagaagaaattaaaactactaacccggtagcaacggagtcctatggacaagtggccacaaaccaccagagtgcccgggcacaggcgcagaccggctgggttcaaaaccaaggaatacttccgggtatggtttggcaggacagagatgtgtacctgcaaggacccatttgggccaaaattcctcacacggacggcaactttcacccttctccgctgatgggagggtttggaatgaagcacccgcctcctcagatcctcatcaaaaacacacctgtacctgcggatcctccaacggccttcaacaagggcaagctgaactctttcatcacccagtattctactggccaagtcagcgtggagatcgagtgggagctgcagaaggaaaacagcaagcgctggaacccggagatccagtacacttccaactattacaagtctaataatgttgaatttgctgttaatactgaaggtgtatatagtgaaccccgccccattggcaccagatacctgactcgtaatctg

SEQ ID NO: 866 - protein, 736 aa, synthetic construct
  REGION 1..736: note = Adeno Associated Virus Capsid Protein Variant
MAADGYLPDWLEDNLSEGIREWWALKPGAPQPKANQQHQDNARGLVLPGYKYLGPGNGLDKGEPVNAADAAALEHDKAYDQQLKAGDNPYLKYNHADAEFQERLKEDTSFGGNLGRAVFQAKKRLLEPLGLVEEAAKTAPGKKRPVEQSPQEPDSSAGIGKSGAQPAKKRLNFGQTGDTESVPDPQPIGEPPAAPSGVGSLTMASGGGAPVADNNEGADGVGSSSGNWHCDSQWLGDRVITTSTRTWALPTYNNHLYKQISNSTSGGSSNDNAYFGYSTPWGYFDFNRFHCHFSPRDWQRLINNNWGFRPKRLNFKLFNIQVKEVTDNNGTKTIANNLTSTVQVFTDSDYQLPYVLGSAHEGCLPPFPADVFMIPQYGYLTLNDGSQAVGRSSFYCLEYFPSQMLRTGNNFQFSYEFENVPFHSSYAHSQSLDRLMNPLIDQYLYYLSKTINGSGQGQQTLKFSVAGPSNMAVQGRNYIPGPSYRQQRVSTTVTFNNNSEFAWPGASSWALNGRNSLMNPGPAMASHKEGEDRFFPLSGSLIFGKQGTGRDNVDADKVMITNEEEIKTTNPVATESYGQVATNHQSARAQAQTGWVQNQGILPGMVWQDRDVYLQGPIWAKIPHTDGNFHPSPLMGGFGMKHPPPQILIKNTPVPADPPTAFNKGKLNSFITQYSTGQVSVEIEWELQKENSKRWNPEIQYTSNYYKSNNVEFAVNTEGVYSEPRPIGTRYLTRNL

SEQ ID NO: 867 - DNA, 2208 bp, synthetic construct
  misc_feature 1..2208: note = Adeno Associated Virus Capsid Protein Variant
  source 1..2208: mol_type = other DNA
atggctgccgatggttatcttccagattggctcgaggacaaccttagtgaaggaattcgcgagtggtgggctttgaaacctggagcccctcaacccaaggcaaatcaacaacatcaagacaacgctcgaggtcttgtgcttccgggttacaaataccttggacccggcaacggactcgacaagggggagccggtcaacgcagcagacgcggcggccctcgagcacgacaaggcctacgaccagcagctcaaggccggagacaacccgtacctcaagtacaaccacgccgacgccgagttccaggagcggctcaaagaagatacgtcttttgggggcaacctcgggcgagcagtcttccaggccaaaaagaggcttcttgaacctcttggtctggttgaggaagcggctaagacggctcctggaaagaagaggcctgtagagcagtctcctcaggaaccggactcctccgcgggtattggcaaatcgggtgcacagcccgctaaaaagagactcaatttcggtcagactggcgacacagagtcagtcccagaccctcaaccaatcggagaacctcccgcagccccctcaggtgtgggatctcttacaatggcttcaggtggtggcgcaccagtggcagacaataacgaaggtgccgatggagtgggtagttcctcgggaaattggcattgcgattcccaatggctgggggacagagtcatcaccaccagcacccgaacctgggccctgcccacctacaacaatcacctctacaagcaaatctccaacagcacatctggaggatcttcaaatgacaacgcctacttcggctacagcaccccttgggggtattttgacttcaacagattccactgccacttctcaccacgtgactggcagcgactcatcaacaacaactggggattccggcctaagcgactcaacttcaagctcttcaacattcaggtcaaagaggttacggacaacaatggagtcaagaccatcgccaataaccttaccagcacggtccaggtcttcacggactcagactatcagctcccgtacgtgctcgggtcggctcacgagggctgcctcccgccgttcccagcggacgttttcatgattcctcagtacgggtatctgacgcttaatgatggaagccaggccgtgggtcgttcgtccttttactgcctggaatatttcccgtcgcaaatgctaagaacgggtaacaacttccagttcagctacgagtttgagaacgtacctttccatagcagctacgctcacagccaaagcctggaccgactaatgaatccactcatcgaccaatacttgtactatctctcaaagactattaacggttctggacagggccaacaaacgctaaaattcagtgtggccggacccagcaacatggctgtccagggaagaaactacatacctggacccagctaccgacaacaacgtgtctcaaccactgtgacttttaacaacaacagcgaatttgcttggcctggagcttcttcttgggctctcaatggacgtaatagcttgatgaatcctggacctgctatggccagccacaaagaaggagaggaccgtttctttcctttgtctggatctttaatttttggcaaacaaggaactggaagagacaacgtggatgcggacaaagtcatgcacaccaacgaagaagaaattaaaactactaacccggtagcaacggagtcctatggacaagtggccacaaaccaccagagtgcccgggcacaggcgcagaccggctgggttcaaaaccaaggaatacttccgggtatggtttggcaggacagagatgtgtacctgcaaggacccatttgggccaaaattcctcacacggacggcaactttcacccttctccgctgatgggagggtttggaatgaagcacccgcctcctcagatcctcatcaaaaacacacctgtacctgcggatcctccaacggccttcaacaagggcaagctgaactctttcatcacccagtattctactggccaagtcagcgtggagatcgagtgggagctgcagaaggaaaacagcaagcgctggaacccggagatccagtacacttccaactattacaagtctaataatgttgaatttgctgttaatactgaaggtgtatatagtgaaccccgccccattggcaccagatacctgactcgtaatctg

SEQ ID NO: 868 - protein, 736 aa, synthetic construct
  REGION 1..736: note = Adeno Associated Virus Capsid Protein Variant
MAADGYLPDWLEDNLSEGIREWWALKPGAPQPKANQQHQDNARGLVLPGYKYLGPGNGLDKGEPVNAADAAALEHDKAYDQQLKAGDNPYLKYNHADAEFQERLKEDTSFGGNLGRAVFQAKKRLLEPLGLVEEAAKTAPGKKRPVEQSPQEPDSSAGIGKSGAQPAKKRLNFGQTGDTESVPDPQPIGEPPAAPSGVGSLTMASGGGAPVADNNEGADGVGSSSGNWHCDSQWLGDRVITTSTRTWALPTYNNHLYKQISNSTSGGSSNDNAYFGYSTPWGYFDFNRFHCHFSPRDWQRLINNNWGFRPKRLNFKLFNIQVKEVTDNNGVKTIANNLTSTVQVFTDSDYQLPYVLGSAHEGCLPPFPADVFMIPQYGYLTLNDGSQAVGRSSFYCLEYFPSQMLRTGNNFQFSYEFENVPFHSSYAHSQSLDRLMNPLIDQYLYYLSKTINGSGQGQQTLKFSVAGPSNMAVQGRNYIPGPSYRQQRVSTTVTFNNNSEFAWPGASSWALNGRNSLMNPGPAMASHKEGEDRFFPLSGSLIFGKQGTGRDNVDADKVMHTNEEEIKTTNPVATESYGQVATNHQSARAQAQTGWVQNQGILPGMVWQDRDVYLQGPIWAKIPHTDGNFHPSPLMGGFGMKHPPPQILIKNTPVPADPPTAFNKGKLNSFITQYSTGQVSVEIEWELQKENSKRWNPEIQYTSNYYKSNNVEFAVNTEGVYSEPRPIGTRYLTRNL

SEQ ID NO: 869 - DNA, 2208 bp, synthetic construct
  misc_feature 1..2208: note = Adeno Associated Virus Capsid Protein Variant
  source 1..2208: mol_type = other DNA
atggctgccgatggttatcttccagattggctcgaggacaaccttagtgaaggaattcgcgagtggtgggctttgaaacctggagcccctcaacccggggcaaatcaacaacatcaagacaacgctcgaggtcttgtgcttccgggttacaaataccttggacccggcaacggactcgacaagggggagccggtcaacgcagcagacgcggcggccctcgagcacgacaaggcctacgaccagcagctcaaggccggagacaacccgtacctcaagtacaaccacgccgacgccgagttccaggagcggctcaaagaagatacgtcttttgggggcaacctcgggcgagcagtcttccaggccaaaaagaggcttcttgaacctcttggtctggttgaggaagcggctaagacggctcctggaaagaagaggcctgtagagcagtctcctcaggaaccggactcctccgcgggtattggcaaatcgggtgcacagcccgctaaaaagagactcaatttcggtcagactggcgacacagagtcagtcccagaccctcaaccaatcggagaacctcccgcagccccctcaggtgtgggatctcttacaatggcttcaggtggtggcgcaccagtggcagacaataacgaaggtgccgatggagtgggtagttcctcgggaaattggcattgcgattcccaatggctgggggacagagtcatcaccaccagcacccgaacctgggccctgcccacctacaacaatcacctctacaagcaaatctccaacagcacatctggaggatcttcaaatgacaacgcctacttcggctacagcaccccctgggggtattttgacttcaacagattccactgccacttctcaccacgtgactggcagcgactcatcaacaacaactggggattccggcctaagcgactcaacttcaagctcttcaacattcaggtcaaagaggttacggacaacaatggagtcaagaccatcgccaataaccttaccagcacggtccaggtcttcacggactcagactatcagctcccgtacgtgctcgggtcggctcacgagggctgcctcccgccgttcccagcggacgttttcatgattcctcagtacgggtatctgacgcttaatgatggaagccaggccgtgggtcgttcgtccttttactgcctggaatatttcccgtcgcaaatgctaagaacgggtaacaacttccagttcagctacgagtttgagaacgtacctttccatagcagctacgctcacagccaaagcctggaccgactaatgaatccactcatcgaccaatacttgtactatctctcaaagactattaacggttctggacagggccaacaaacgctaaaattcagtgtggccggacccagcaacatggctgtccagggaagaaactacatacctggacccagctaccgacaacaacgtgtctcaaccactgtgacttttaacaacaacagcgaatttgcttggcctggagcttcttcttgggctctcaatggacgtaatagcttgatgaatcctggacctgctatggccagccacaaagaaggagaggaccgtttctttcctttgtctggatctttaatttttggcaaacaaggaactggaagagacaacgtggatgcggacaaagtcatgataaccaacgaagaagaaattaaaactactaacccggtagcaacggagtcctatggacaagtggccacaaaccaccagagtgcccgggcacaggcgcagaccggctgggttcaaaaccaaggaatacttccgggtatggtttggcaggacagagatgtgtacctgcaaggacccatttgggccaaaattcctcacacggacggcaactttcacccttctccgctgatgggagggtttggaatgaagcacccgcctcctcagatcctcatcaaaaacacacctgtacctgcggatcctccaacggccttcaacaagggcaagctgaactctttcatcacccagtattctactggccaagtcagcgtggagatcgagtgggagctgcagaaggaaaacagcaagcgctggaacccggagatccagtacacttccaactattacaagtctaataatgttgaatttgctgttaatactgaaggtgtatatagtgaaccccgccccattggcaccagatacctgactcgtaatctg

SEQ ID NO: 870 - protein, 736 aa, synthetic construct
  REGION 1..736: note = Adeno Associated Virus Capsid Protein Variant
MAADGYLPDWLEDNLSEGIREWWALKPGAPQPGANQQHQDNARGLVLPGYKYLGPGNGLDKGEPVNAADAAALEHDKAYDQQLKAGDNPYLKYNHADAEFQERLKEDTSFGGNLGRAVFQAKKRLLEPLGLVEEAAKTAPGKKRPVEQSPQEPDSSAGIGKSGAQPAKKRLNFGQTGDTESVPDPQPIGEPPAAPSGVGSLTMASGGGAPVADNNEGADGVGSSSGNWHCDSQWLGDRVITTSTRTWALPTYNNHLYKQISNSTSGGSSNDNAYFGYSTPWGYFDFNRFHCHFSPRDWQRLINNNWGFRPKRLNFKLFNIQVKEVTDNNGVKTIANNLTSTVQVFTDSDYQLPYVLGSAHEGCLPPFPADVFMIPQYGYLTLNDGSQAVGRSSFYCLEYFPSQMLRTGNNFQFSYEFENVPFHSSYAHSQSLDRLMNPLIDQYLYYLSKTINGSGQGQQTLKFSVAGPSNMAVQGRNYIPGPSYRQQRVSTTVTFNNNSEFAWPGASSWALNGRNSLMNPGPAMASHKEGEDRFFPLSGSLIFGKQGTGRDNVDADKVMITNEEEIKTTNPVATESYGQVATNHQSARAQAQTGWVQNQGILPGMVWQDRDVYLQGPIWAKIPHTDGNFHPSPLMGGFGMKHPPPQILIKNTPVPADPPTAFNKGKLNSFITQYSTGQVSVEIEWELQKENSKRWNPEIQYTSNYYKSNNVEFAVNTEGVYSEPRPIGTRYLTRNL

SEQ ID NO: 871 - DNA, 2208 bp, synthetic construct
  misc_feature 1..2208: note = Adeno Associated Virus Capsid Protein Variant
  source 1..2208: mol_type = other DNA
atggctgccgatggttatcttccagattggctcgaggacaaccttagtgaaggaattcgcgagtggtgggctttgaaacctggagcccctcaacccaaggcaaatcaacaacatcaagacaacgctcgaggtcttgtgcttccgggttacaaataccttggacccggcaacggactcgacaagggggagccggtcaacgcagcagacgcggcggccctcgagcacgacaaggcctacgaccagcagctcaaggccggagacaacccgtacctcaagtacaaccacgccgacgccgagttccaggagcggctcaaagaagatacgtcttttgggggcaacctcgggcgagcagtcttccaggccaaaaagaggcttcttgaacctcttggtctggttgaggaagcggctaagacggctcctggaaagaagaggcctgtagagcagtctcctcaggaaccggactcctccgcgggtattggcaaatcgggtgcacagcccgctaaaaagagactcaatttcggtcagactggcgacacagagtcagtcccagaccctcaaccaatcggatgccctcccgcagccccctcaggtgtgggatctcttacaatggcttcaggtggtggcgcaccagtggcagacaataacgaaggtgccgatggagtgggtagttcctcgggaaattggcattgcgattcccaatggctgggggacagagtcatcaccaccagcacccgaacctgggccctgcccacctacaacaatcacctctacaagcaaatctccaacagcacatctggaggatcttcaaatgacaacgcctacttcggctacagcaccccctgggggtattttgacttcaacagattccactgccacttctcaccacgtgactggcagcgactcatcaacaacaactggggattccggcctaagcgactcaacttcaagctcttcaacattcaggtcaaagaggttacggacaacaatggagtcaagaccatcgccaataaccttaccagcacggtccaggtcttcacggactcagactatcagctcccgtacgtgctcgggtcggctcacgagggctgcctcccgccgttcccagcggacgttttcatgattcctcagtacgggtatctgacgcttaatgatggaagccaggccgtgggtcgttcgtccttttactgcctggaatatttcccgtcgcaaatgctaagaacgggtaacaacttccagttcagctacgagtttgagaacgtacctttccatagcagctacgctcacagccaaagcctggaccgactaatgaatccactcatcgaccaatacttgtactatctctcaaagactattaacggttctggacagggccaacaaacgctaaaattcagtgtggccggacccagcaacatggctgtccagggaagaaactacatacctggacccagctaccgacaacaacgtgtctcaaccactgtgacttttaacaacaacagcgaatttgcttggcctggagcttcttcttgggctctcaatggacgtaatagcttgatgaatcctggacctgctatggccagccacaaagaaggagaggaccgtttctttcctttgtctggatctttaatttttggcaaacaaggaactggaagagacaacgtggatgcggacaaagtcatgataaccaacgaagaagaaattaaaactactaacccggtagcaacggagtcctatggacaagtggccacaaaccaccagagtgcccgggcacaggcgcagaccggctgggttcaaaaccaaggaatacttccgggtatggtttggcaggacagagatgtgtacctgcaaggacccatttgggccaaaattcctcacacggacggcaactttcacccttctccgctgatgggagggtttggaatgaagcacccgcctcctcagatcctcatcaaaaacacacctgtacctgcggatcctccaacggccttcaacaagggcaagctgaactctttcatcacccagtattctactggccaagtcagcgtggagatcgagtgggagctgcagaaggaaaacagcaagcgctggaacccggagatccagtacacttccaactattacaagtctaataatgttgaatttgctgttaatactgaaggtgtatatagtgaaccccgccccattggcaccagatacctgactcgtaatctg

SEQ ID NO: 872 - protein, 736 aa, synthetic construct
  REGION 1..736: note = Adeno Associated Virus Capsid Protein Variant
MAADGYLPDWLEDNLSEGIREWWALKPGAPQPKANQQHQDNARGLVLPGYKYLGPGNGLDKGEPVNAADAAALEHDKAYDQQLKAGDNPYLKYNHADAEFQERLKEDTSFGGNLGRAVFQAKKRLLEPLGLVEEAAKTAPGKKRPVEQSPQEPDSSAGIGKSGAQPAKKRLNFGQTGDTESVPDPQPIGCPPAAPSGVGSLTMASGGGAPVADNNEGADGVGSSSGNWHCDSQWLGDRVITTSTRTWALPTYNNHLYKQISNSTSGGSSNDNAYFGYSTPWGYFDFNRFHCHFSPRDWQRLINNNWGFRPKRLNFKLFNIQVKEVTDNNGVKTIANNLTSTVQVFTDSDYQLPYVLGSAHEGCLPPFPADVFMIPQYGYLTLNDGSQAVGRSSFYCLEYFPSQMLRTGNNFQFSYEFENVPFHSSYAHSQSLDRLMNPLIDQYLYYLSKTINGSGQGQQTLKFSVAGPSNMAVQGRNYIPGPSYRQQRVSTTVTFNNNSEFAWPGASSWALNGRNSLMNPGPAMASHKEGEDRFFPLSGSLIFGKQGTGRDNVDADKVMITNEEEIKTTNPVATESYGQVATNHQSARAQAQTGWVQNQGILPGMVWQDRDVYLQGPIWAKIPHTDGNFHPSPLMGGFGMKHPPPQILIKNTPVPADPPTAFNKGKLNSFITQYSTGQVSVEIEWELQKENSKRWNPEIQYTSNYYKSNNVEFAVNTEGVYSEPRPIGTRYLTRNL

SEQ ID NO: 873 - DNA, 2208 bp, synthetic construct
  misc_feature 1..2208: note = Adeno Associated Virus Capsid Protein Variant
  source 1..2208: mol_type = other DNA
atggctgccgatggttatcttccagattggctcgaggacaaccttagtgaaggaattcgcgagtggtgggctttgaaacctggagcccctcaacccaaggcaaatcaacaacatcaagacaacgctcgaggtcttgtgcttccgggttacgaataccttggacccggcaacggactcgacaagggggagccggtcaacgcagcagacgcggcggccctcgagcacgacaaggcctacgaccagcagctcaaggccggagacaacccgtacctcaagtacaaccacgccgacgccgagttccaggagcggctcaaagaagatacgtcttttgggggcaacctcgggcgagcagtcttccaggccaaaaagaggcttcttgaacctcttggtctggttgaggaagcggctaagacggctcctggaaagaagaggcctgtagagcagtctcctcaggaaccggactcctccgcgggtattggcaaatcgggtgcacagcccgctaaaaagagactcaatttcggtcagactggcgacacagagtcagtcccagaccctcaaccaatcggagtccctcccgcagccccctcaggtgtgggatctcttacaatggcttcaggtggtggcgcaccagtggcagacaataacgaaggtgccgatggagtgggtagttcctcgggaaattggcattgcgattcccaatggctgggggacagagtcatcaccaccagcacccgaacctgggccctgcccacctacaacaatcacctctacaagcaaatctccaacagcacatctggaggatcttcaaatgacaacgcctacttcggctacagcaccccctgggggtattttgacttcaacagattccactgccacttctcaccacgtgactggcagcgactcatcaacaacaactggggattccggcctaagcgactcaacttcaagctcttcaacattcaggtcaaagaggttacggacaacaatggagtcaagaccatcgccaataaccttaccagcacggtccaggtcttcacggactcagactatcagctcccgtacgtgctcgggtcggctcacgagggctgcctcccgccgttcccagcggacgttttcatgattcctcagtacgggtatctgacgcttaatgatggaagccaggccgtgggtcgttcgtccttttactgcctggaatatttcccgtcgcaaatgctaagaacgggtaacaacttccagttcagctacgagtttgagaacgtacctttccatagcagctacgctcacagccaaagcctggaccgactaatgaatccactcatcgaccaatacttgtactatctctcaaagactattaacggttctggacagggccaacaaacgctaaaattcagtgtggccggacccagcaacatggctgtccagggaagaaactacatacctggacccagctaccgacaacaacgtgtctcaaccactgtgacttttaacaacaacagcgaatttgcttggcctggagcttcttcttgggctctcaatggacgtaatagcttgatgaatcctggacctgctatggccagccacaaagaaggagaggaccgtttctttcctttgtctggatctttaatttttggcaaacaaggaactggaagagacaacgtggatgcggacaaagtcatgataaccaacgaagaagaaattaaaactactaacccggtagcaacggagtcctatggacaagtggccacaaaccaccagagtgcccgggcacaggcgcagaccggctgggttcaaaaccaaggaatacttccgggtatggtttggcaggacagagatgtgtacctgcaaggacccatttgggccaaaattcctcacacggacggcaactttcacccttctccgctgatgggagggtttggaatgaagcacccgcctcctcagatcctcatcaaaaacacacctgtacctgcggatcctccaacggccttcaacaagggcaagctgaactctttcatcacccagtattctactggccaagtcagcgtggagatcgagtgggagctgcagaaggaaaacagcaagcgctggaacccggagatccagtacacttccaactattacaagtctaataatgttgaatttgctgttaatactgaaggtgtatatagtgaaccccgccccattggcaccagatacctgactcgtaatctg

SEQ ID NO: 874 - protein, 736 aa, synthetic construct
  REGION 1..736: note = Adeno Associated Virus Capsid Protein Variant
MAADGYLPDWLEDNLSEGIREWWALKPGAPQPKANQQHQDNARGLVLPGYEYLGPGNGLDKGEPVNAADAAALEHDKAYDQQLKAGDNPYLKYNHADAEFQERLKEDTSFGGNLGRAVFQAKKRLLEPLGLVEEAAKTAPGKKRPVEQSPQEPDSSAGIGKSGAQPAKKRLNFGQTGDTESVPDPQPIGVPPAAPSGVGSLTMASGGGAPVADNNEGADGVGSSSGNWHCDSQWLGDRVITTSTRTWALPTYNNHLYKQISNSTSGGSSNDNAYFGYSTPWGYFDFNRFHCHFSPRDWQRLINNNWGFRPKRLNFKLFNIQVKEVTDNNGVKTIANNLTSTVQVFTDSDYQLPYVLGSAHEGCLPPFPADVFMIPQYGYLTLNDGSQAVGRSSFYCLEYFPSQMLRTGNNFQFSYEFENVPFHSSYAHSQSLDRLMNPLIDQYLYYLSKTINGSGQGQQTLKFSVAGPSNMAVQGRNYIPGPSYRQQRVSTTVTFNNNSEFAWPGASSWALNGRNSLMNPGPAMASHKEGEDRFFPLSGSLIFGKQGTGRDNVDADKVMITNEEEIKTTNPVATESYGQVATNHQSARAQAQTGWVQNQGILPGMVWQDRDVYLQGPIWAKIPHTDGNFHPSPLMGGFGMKHPPPQILIKNTPVPADPPTAFNKGKLNSFITQYSTGQVSVEIEWELQKENSKRWNPEIQYTSNYYKSNNVEFAVNTEGVYSEPRPIGTRYLTRNL

SEQ ID NO: 875 - DNA, 2208 bp, synthetic construct
  misc_feature 1..2208: note = Adeno Associated Virus Capsid Protein Variant
  source 1..2208: mol_type = other DNA
atggctgccgatggttatcttccagattggctcgaggacaaccttagtgaaggaattcgcgagtggtgggctttgaaacctggagcccctcaacccaaggcaaatcaacaacatcaagacaacgctcgaggtcttgtgcttccgggttacaaataccttggacccggcaacggactcgacaagggggagccggtcaacgcagcagacgcggcggccctcgagcacgacaaggcctacgaccagcagctcaaggccggagacaacccgtacctcaagtacaaccacgccgacgccgagttccaggagcggctcaaagaagatacgtcttttgggggcaacctcgggcgagcagtcttccaggccaaaaagaggcttcttgaacctcttggtctggttgaggaagcggctaagacggctcctggaaagaagaggcctgtagagcagtctcctcaggaaccggactcctccgcgggtattggcaaatcgggtgcacagcccgctaaaaagagactcaatttcggtcagactggcgacacagagtcagtcccagaccctcaaccaatcggagaacctcccgcagccccctcaggtgtgggatctcttacaatggcttcaggtggtggcgcaccagtggcagacaataacgaaggtgccgatggagtgggtagttcctcgggaaattggcattgcgattcccaatggctgggggacagagtcatcaccaccagcacccgaacctgggccctgcccacctacaacaatcacctctacaagcaaatctccaacagcacatctggaggatcttcaaatgacaacgcctacttcggctacagcaccccctgggggtattttgacttcaacagattccactgccacttctcaccacgtgactggcagcgactcatcaacaacaactggggattccggcctaagcgactcaacttcaagctcttcaacattcaggtcaaagaggttacggacaacaatggagtcaagaccatcgccaataaccttaccagcacggtccaggtcttcacggactcagactatcagctcccgtacgtgctcgggtcggctcacgagggctgcctcccgccgttcccagcggacgttttcatgattcctcagtacgggtatctgacgcttaatgatggaagccaggccgtgggtcgttcgtccttttactgcctggaatatttcccgtcgcaaatgctaagaacgggtaacaacttccagttcagctacgagtttgagaacgtacctttccatagcagctacgctcacagccaaagcctggaccgactaatgaatccactcatcgaccaatacttgtactatctctcaaagactattaacggttctggacagggccaacaaacgctaaaattcagtgtggccggacccagcaacatggctgtccagggaagaaactacatacctggacccagctaccgacaacaacgtgtctcaaccactgtgacttttaacaacaacagcgaatttgcttggcctggagcttcttcttgggctctcaatggacgtaatagcttgatgaatcctggacctgctatggccagccacaaagaaggagaggaccgtttctttcctttgtctggatctttaatttttggcaaacaaggaactggaagagacaacgtggatgcggacaaagtcatgataaccaacgaagaagaaattaaaactactaacccggtagcaacggagtcctatggacaagtggccacaaaccaccagagtgcccgggcacaggcgcagaccggctgggttcaaaaccaaggaatacttccgggtatggtttggcaggacagagatgtgtacctgcaaggacccatttgggccaaaattcctcacacggacggcaactttcacccttctccgctgatgggagggtttggaatgaagcacccgcctcctcagatcctcatcaaaaacacacctgtacctgcggatcctccaacggccttcaacaagggcaagctgaactctttcatcacccagtattctactggccaagtcagcgtggagatcgagtgggagctgcagaaggaaaacagcaagcgctggaacccggagatccagtacacttccaactattacaagtctaataatgttgaatttgctgttaatactgaaggtgtatatagtgaagtccgccccattggcaccagatacctgactcgtaatctg

SEQ ID NO: 876 - protein, 736 aa, synthetic construct
  REGION 1..736: note = Adeno Associated Virus Capsid Protein Variant
MAADGYLPDWLEDNLSEGIREWWALKPGAPQPKANQQHQDNARGLVLPGYKYLGPGNGLDKGEPVNAADAAALEHDKAYDQQLKAGDNPYLKYNHADAEFQERLKEDTSFGGNLGRAVFQAKKRLLEPLGLVEEAAKTAPGKKRPVEQSPQEPDSSAGIGKSGAQPAKKRLNFGQTGDTESVPDPQPIGEPPAAPSGVGSLTMASGGGAPVADNNEGADGVGSSSGNWHCDSQWLGDRVITTSTRTWALPTYNNHLYKQISNSTSGGSSNDNAYFGYSTPWGYFDFNRFHCHFSPRDWQRLINNNWGFRPKRLNFKLFNIQVKEVTDNNGVKTIANNLTSTVQVFTDSDYQLPYVLGSAHEGCLPPFPADVFMIPQYGYLTLNDGSQAVGRSSFYCLEYFPSQMLRTGNNFQFSYEFENVPFHSSYAHSQSLDRLMNPLIDQYLYYLSKTINGSGQGQQTLKFSVAGPSNMAVQGRNYIPGPSYRQQRVSTTVTFNNNSEFAWPGASSWALNGRNSLMNPGPAMASHKEGEDRFFPLSGSLIFGKQGTGRDNVDADKVMITNEEEIKTTNPVATESYGQVATNHQSARAQAQTGWVQNQGILPGMVWQDRDVYLQGPIWAKIPHTDGNFHPSPLMGGFGMKHPPPQILIKNTPVPADPPTAFNKGKLNSFITQYSTGQVSVEIEWELQKENSKRWNPEIQYTSNYYKSNNVEFAVNTEGVYSEVRPIGTRYLTRNL

SEQ ID NO: 877 - DNA, 2208 bp, synthetic construct
  misc_feature 1..2208: note = Adeno Associated Virus Capsid Protein Variant
  source 1..2208: mol_type = other DNA
atggctgccgatggttatcttccagattggctcgaggacaaccttagtgaaggaattcgcgagtggtgggctttgaaacctggagcccctcaacccaaggcaaatcaacaacatcaagacaacgctcgaggtcttgtgcttccgggttacaaataccttggacccggcaacggactcgacaagggggagccggtcaacgcagcagacgcggcggccctcgagcacgacaaggcctacgaccagcagctcaaggccggagacaacccgtacctcaagtacaaccacgccgacgccgagttccaggagcggctcaaagaagatacgtcttttgggggcaacctcgggcgagcagtcttccaggccaaaaagaggcttcttgaacctcttggtctggttgaggaagcggctaagacggctcctggaaagaagaggcctgtagagcagtctcctcaggaaccggactcctccgcgggtattggcaaatcgggtgcacagcccgctaaaaagagactcaatttcggtcagactggcgacacagagtcagtcccagaccctcaaccaatcggagaacctcccgcagccccctcaggtgtgggatctcttacaatggcttcaggtggtggcgcaccagtggcagacaataacgaaggtgccgatggagtgggtagttcctcgggaaattggcattgcgattcccaatggctgggggacagagtcatcaccaccagcacccgaacctgggccctgcccacctacaacaatcacctctacaagcaaatctccaacagcacatctggaggatcttcaaatgacaacgcctacttcggctacagcaccccctgggggtattttgacttcaacagattccactgccacttctcaccacgtgactggcagcgactcatcaacaacaactggggattccggcctaagcgactcaacttcaagctcttcaacattcaggtcaaagaggttacggacaacaatggagtcaagaccatcgccaataaccttaccagcacggtccaggtcttcacggactcagactatcagctcccgtacgtgctcgggtcggctcacgagggctgcctcccgccgttcccagcggacgttttcatgattcctcagtacgggtatctgacgcttaatgatggaagccaggccgtgggtcgttcgtccttttactgcctggaatatttcccgtcgcaaatgctaagaacgggtaacaacttccagttcagctacgagtttgagaacgtacctttccatagcagctacgctcacagccaaagcctggaccgactaatgaatccactcatcgaccaatacttgtactatctctcaaagactattaacggttctggacagggccaacaaacgctaaaattcagtgtggccggacccagcaacatggctgtccagggaagaaactacatacctggacccagctaccaacaacaacgtgtctcaaccactgtgacttttaacaacaacagcgaatttgcttggcctggagcttcttcttgggctctcaatggacgtaatagcttgatgaatcctggacctgctatggccagccacaaagaaggagaggaccgtttctttcctttgtctggatctttaatttttggcaaacaaggaactggaagagacaacgtggatgcggacaaagtcatgataaccaacgaagaagaaattaaaactactaacccggtagcaacggagtcctatggacaagtggccacaaaccaccagagtgcccgggcacaggcgcagaccggctgggttattaaccaaggaatacttccgggtatggtttggcaggacagagatgtgtacctgcaaggacccatttgggccaaaattcctcacacggacggcaactttcacccttctccgctgatgggagggtttggaatgaagcacccgcctcctcagatcctcatcaaaaacacacctgtacctgcggatcctccaacggccttcaacaagggcaagctgaactctttcatcacccagtattctactggccaagtcagcgtggagatcgagtgggagctgcagaaggaaaacagcaagcgctggaacccggagatccagtacacttccaactattacaagtctaataatgttgaatttgctgttaatactgaaggtgtatatagtgaaccccgccccattggcaccagatacctgactcgtaatctg

SEQ ID NO: 878 - protein, 736 aa, synthetic construct
  REGION 1..736: note = Adeno Associated Virus Capsid Protein Variant
MAADGYLPDWLEDNLSEGIREWWALKPGAPQPKANQQHQDNARGLVLPGYKYLGPGNGLDKGEPVNAADAAALEHDKAYDQQLKAGDNPYLKYNHADAEFQERLKEDTSFGGNLGRAVFQAKKRLLEPLGLVEEAAKTAPGKKRPVEQSPQEPDSSAGIGKSGAQPAKKRLNFGQTGDTESVPDPQPIGEPPAAPSGVGSLTMASGGGAPVADNNEGADGVGSSSGNWHCDSQWLGDRVITTSTRTWALPTYNNHLYKQISNSTSGGSSNDNAYFGYSTPWGYFDFNRFHCHFSPRDWQRLINNNWGFRPKRLNFKLFNIQVKEVTDNNGVKTIANNLTSTVQVFTDSDYQLPYVLGSAHEGCLPPFPADVFMIPQYGYLTLNDGSQAVGRSSFYCLEYFPSQMLRTGNNFQFSYEFENVPFHSSYAHSQSLDRLMNPLIDQYLYYLSKTINGSGQGQQTLKFSVAGPSNMAVQGRNYIPGPSYQQQRVSTTVTFNNNSEFAWPGASSWALNGRNSLMNPGPAMASHKEGEDRFFPLSGSLIFGKQGTGRDNVDADKVMITNEEEIKTTNPVATESYGQVATNHQSARAQAQTGWVINQGILPGMVWQDRDVYLQGPIWAKIPHTDGNFHPSPLMGGFGMKHPPPQILIKNTPVPADPPTAFNKGKLNSFITQYSTGQVSVEIEWELQKENSKRWNPEIQYTSNYYKSNNVEFAVNTEGVYSEPRPIGTRYLTRNL

SEQ ID NO: 879 - DNA, 2208 bp, synthetic construct
  misc_feature 1..2208: note = Adeno Associated Virus Capsid Protein Variant
  source 1..2208: mol_type = other DNA
atggctgccgatggttatcttccagattggctcgaggacaaccttagtgaaggaattcgcgagtggtgggctttgaaacctggagcccctcaacccaaggcaaatcaacaacatcaagacaacgctcgaggtcttgtgcttccgggttacaaataccttggacccggcaacggactcgacaagggggagccggtcaacgcagcagacgcggcggccctcgagcacgacaaggcctacgaccagcagctcaaggccggagacaacccgtacctcaagtacaaccacgccgacgccgagttccaggagcggctcaaagaagatacgtcttttgggggcaacctcgggcgagcagtcttccaggccaaaaagaggcttcttgaacctcttggtctggttgaggaagcggctaagacggctcctggaaagaagaggcctgtagagcagtctcctcaggaaccggactcctccgcgggtattggcaaatcgggtgcacagcccgctaaaaagagactcaatttcggtcagactggcgacacagagtcagtcccagaccctcaaccaatcggagaacctcccgcagccccctcaggtgtgggatctcttacaatggcttcaggtggtggcgcaccagtggcagacaataacgaaggtgccgatggagtgggtagttcctcgggaaattggcattgcgattcccaatggctgggggacagagtcatcaccaccagcacccgaacctgggccctgcccacctacaacaatcacctctacaagcaaatctccaacagcacatctggaggatcttcaaatgacaacgcctacttcggctacagcaccccctgggggtattttgacttcaacagattccactgccacttctcaccacgtgactggcagcgactcatcaacaacaactggggattccggcctaagcgactcaacttcaagctcttcaacattcaggtcaaagaggttacggacaacaatggagtcaagaccatcgccaataaccttaccagcacggtccaggtcttcacggactcagactatcagctcccgtacgtgctcgggtcggctcacgagggctgcctcccgccgttcccagcggacgttttcatgattcctcagtacgggtatctgacgcttaatgatggaagccaggccgtgggtcgttcgtccttttactgcctggaatatttcccgtcgcaaatgctaagaacgggtaacaacttccagttcagctacgagtttgagaacgtacctttccatagcagctacgctcacagccaaagcctggaccgactaatgaatccactcatcgaccaatacttgtactatctctcaaagactattaacggttctggacagggccaacaaacgctaaaattcagtgtggccggacccagcaacatggctgtccagggaagaaactacatacctggacccagctaccgacaacaacgtgtctcaaccactgtgacttttaacaacaacagcgaatttgcttggcctggagcttcttcttggacactcaatggacgtaatagcttgatgaatcctggacctgctatggccagccacaaagaaggagaggaccgtttctttcctttgtctggatctttaatttttggcaaacaaggaactggaagagacaacgtggatgcggacaaagtcatgataaccaacgaagaagaaattaaaactactaacccggtagcaacggagtcctatggacaagtggccacaaaccaccagagtgcccgggcacaggcgcagaccggctgggttcaaaaccaaggaatacttccgggtatggtttggcaggacagagatgtgtacctgcaaggacccatttgggccaaaattcctcacacggacggcaactttcacccttctccgctgatgggagggtttggaatgaagcacccgcctcctcagatcctcatcaaaaacacacctgtacctgcggatcctccaacggccttcaacaagggcaagctgaactctttcatcacccagtattctactggccaagtcagcgtggagatcgagtgggagctgcagaaggaaaacagcaagcgctggaacccggagatccagtacacttccaactattacaagtctaataatgttgaatttgctgttaatactgaaggtgtatatagtgaaccccgccccattggcaccagatacctgactcgtaatctg

SEQ ID NO: 880 - protein, 736 aa, synthetic construct
  REGION 1..736: note = Adeno Associated Virus Capsid Protein Variant
MAADGYLPDWLEDNLSEGIREWWALKPGAPQPKANQQHQDNARGLVLPGYKYLGPGNGLDKGEPVNAADAAALEHDKAYDQQLKAGDNPYLKYNHADAEFQERLKEDTSFGGNLGRAVFQAKKRLLEPLGLVEEAAKTAPGKKRPVEQSPQEPDSSAGIGKSGAQPAKKRLNFGQTGDTESVPDPQPIGEPPAAPSGVGSLTMASGGGAPVADNNEGADGVGSSSGNWHCDSQWLGDRVITTSTRTWALPTYNNHLYKQISNSTSGGSSNDNAYFGYSTPWGYFDFNRFHCHFSPRDWQRLINNNWGFRPKRLNFKLFNIQVKEVTDNNGVKTIANNLTSTVQVFTDSDYQLPYVLGSAHEGCLPPFPADVFMIPQYGYLTLNDGSQAVGRSSFYCLEYFPSQMLRTGNNFQFSYEFENVPFHSSYAHSQSLDRLMNPLIDQYLYYLSKTINGSGQGQQTLKFSVAGPSNMAVQGRNYIPGPSYRQQRVSTTVTFNNNSEFAWPGASSWTLNGRNSLMNPGPAMASHKEGEDRFFPLSGSLIFGKQGTGRDNVDADKVMITNEEEIKTTNPVATESYGQVATNHQSARAQAQTGWVQNQGILPGMVWQDRDVYLQGPIWAKIPHTDGNFHPSPLMGGFGMKHPPPQILIKNTPVPADPPTAFNKGKLNSFITQYSTGQVSVEIEWELQKENSKRWNPEIQYTSNYYKSNNVEFAVNTEGVYSEPRPIGTRYLTRNL

SEQ ID NO: 881 - DNA, 2208 bp, synthetic construct
  misc_feature 1..2208: note = Adeno Associated Virus Capsid Protein Variant
  source 1..2208: mol_type = other DNA
atggctgccgatggttatcttccagattggctcgaggacaaccttagtgaaggaattcgcgagtggtgggctttgaaacctggagcccctcaacccaaggcaaatcaacaacatcaagacaacgctcgaggttttgtgcttccgggttacaaataccttggacccggcaacggactcgacaagggggagccggtcaacgcagcagacgcggcggccctcgagcacgacaaggcctacgaccagcagctcaaggccggagacaacccgtacctcaagtacaaccacgccgacgccgagttccaggagcggctcaaagaagatacgtcttttgggggcaacctcgggcgagcagtcttccaggccaaaaagaggcttcttgaacctcttggtctggttgaggaagcggctaagacggctcctggaaagaagaggcctgtagagcagtctcctcaggaaccggactcctccgcgggtattggcaaatcgggtgcacagcccgctaaaaagagactcaatttcggtcagactggcgacacagagtcagtcccagaccctcaaccaatcggagaacctcccgcagccccctcaggtgtgggatctcttacaatggcttcaggtggtggcgcaccagtggcagacaataacgaaggtgccgatggagtgggtagttcctcgggaaattggcattgcgattcccaatggctgggggacagagtcatcaccaccagcacccgaacctgggccctgcccacctacaacaatcacctctacaagcaaatctccaacagcacatctggaggatcttcaaatgacaacgcctacttcggctacagcaccccctgggggtattttgacttcaacagattccactgccacttctcaccacgtgactggcagcgactcatcaacaacaactggggattccggcctaagcgactcaacttcaagctcttcaacattcaggtcaaagaggttacggacaacaatggagtcaagaccatcgccaataaccttaccagcacggtccaggtcttcacggactcagactatcagctcccgtacgtgctcgggtcggctcacgagggctgcctcccgccgttcccagcggacgttttcatgattcctcagtacgggtatctgacgcttaatgatggaagccaggccgtgggtcgttcgtccttttactgcctggaatatttcccgtcgcaaatgctaagaacgggtaacaacttccagttcagctacgagtttgagaacgtacctttccatagcagctacgctcacagccaaagcctggaccgactaatgaatccactcatcgaccaatacttgtactatctctcaaagactattaacggttctggacagggccaacaaacgctaaaattcagtgtggccggacccagcaacatggctgtccagggaagaaactacatacctggacccagctaccgacaacaacgtgtctcaaccactgtgacttttaacaacaacagcgaatttgcttggcctggagcttcttcttgggctctcaatggacgtaatagcttgatgaatcctggacctgctatggccagccacaaagaaggagaggaccgtttctttcctttgtctggatctttaatttttggcaaacaaggaactggaagagacaacgtggatgcggacaaagtcatgataaccaacgaagaagaaattaaaactactaacccggtagcaacggagtcctatggacaagtggccacaaaccaccagagtgcccgggcacaggcgcagaccggctgggttcaaaaccaaggaatacttccgggtatggtttggcaggacagagatgtgtacctgcaaggacccatttgggccaaaattcctcacacggacggcaactttcacccttctccgctgatgggagggtttggaatgaagcacccgcctcctcagatcctcatcaaaaacacacctgtacctgcggatcctccaacggccttcaacaagggcaagctgaactctttcatcacccagtattctactggccaagtcagcgtggagatcgagtgggagctgcagaaggaaaacagcaagcgctggaacccggagatccagtacacttccaactattacaagtctaataatgttgaatttgctgttaatactgaaggtgtatatagtgaaccccgccccattggcaccagatacctgactcgtaatctg

SEQ ID NO: 882 - protein, 736 aa, synthetic construct
  REGION 1..736: note = Adeno Associated Virus Capsid Protein Variant
MAADGYLPDWLEDNLSEGIREWWALKPGAPQPKANQQHQDNARGFVLPGYKYLGPGNGLDKGEPVNAADAAALEHDKAYDQQLKAGDNPYLKYNHADAEFQERLKEDTSFGGNLGRAVFQAKKRLLEPLGLVEEAAKTAPGKKRPVEQSPQEPDSSAGIGKSGAQPAKKRLNFGQTGDTESVPDPQPIGEPPAAPSGVGSLTMASGGGAPVADNNEGADGVGSSSGNWHCDSQWLGDRVITTSTRTWALPTYNNHLYKQISNSTSGGSSNDNAYFGYSTPWGYFDFNRFHCHFSPRDWQRLINNNWGFRPKRLNFKLFNIQVKEVTDNNGVKTIANNLTSTVQVFTDSDYQLPYVLGSAHEGCLPPFPADVFMIPQYGYLTLNDGSQAVGRSSFYCLEYFPSQMLRTGNNFQFSYEFENVPFHSSYAHSQSLDRLMNPLIDQYLYYLSKTINGSGQGQQTLKFSVAGPSNMAVQGRNYIPGPSYRQQRVSTTVTFNNNSEFAWPGASSWALNGRNSLMNPGPAMASHKEGEDRFFPLSGSLIFGKQGTGRDNVDADKVMITNEEEIKTTNPVATESYGQVATNHQSARAQAQTGWVQNQGILPGMVWQDRDVYLQGPIWAKIPHTDGNFHPSPLMGGFGMKHPPPQILIKNTPVPADPPTAFNKGKLNSFITQYSTGQVSVEIEWELQKENSKRWNPEIQYTSNYYKSNNVEFAVNTEGVYSEPRPIGTRYLTRNL

SEQ ID NO: 883 - DNA, 2208 bp, synthetic construct
  misc_feature 1..2208: note = Adeno Associated Virus Capsid Protein Variant
  source 1..2208: mol_type = other DNA
atggctgccgatggttatcttccagattggctcgaggacaaccttagtgaaggaattcgcgagtggtgggctttgaaacctggagcccctcaacccaaggcaaatcaacaacatcaagacaacgctcgaggtcttgtgcttccgggttacaaataccttggacccggcaacggactcgacaagggggagccggtcaacgcagcagacgcggcggccctcgagcacgacaaggcctacgaccagcagctcaaggccggagacaacccgtacctcaagtacaaccacgccgacgccgagttccaggagcggctcaaagaagatacgtcttttgggggcaacctcgggcgagcagtcttccaggccaaaaagaggcttcttgaacctcttggtctggttgaggaagcggctaagacggctcctggaaagaagaggcctgtagagcagtctcctcaggaaccggactcctccgcgggtattggcaaatcgggtgcacagcccgctaaaaagagactcaatttcggtcagactggcgacacagagtcagtcccagaccctcaaccaatcggagaacctcccgcagccccctcaggtgtgggatctcttacaatggcttcaggtggtggcgcaccagtggcagacaataacgaaggtgccgatggagtgggtagttcctcgggaaattggcattgcgattcccaatggctgggggacagagtcatcaccaccagcacccgaacctgggccctgcccacctacaacaatcacatctacaagcaaatctccaacagcacatctggaggatcttcaaatgacaacgcctacttcggctacagcaccccctgggggtattttgacttcaacagattccactgccacttctcaccacgtgactggcagcgactcatcaacaacaactggggattccggcctaagcgactcaacttcaagctcttcaacattcaggtcaaagaggttacggacaacaatggagtcaagaccatcgccaataaccttaccagcacggtccaggtcttcacggactcagactatcagctcccgtacgtgctcgggtcggctcacgagggctgcctcccgccgttcccagcggacgttttcatgattcctcagtacgggtatctgacgcttaatgatggaagccaggccgtgggtcgttcgtccttttactgcctggaatatttcccgtcgcaaatgctaagaacgggtaacaacttccagttcagctacgagtttgagaacgtacctttccatagcagctacgctcacagccaaagcctggaccgactaatgaatccactcatcgaccaatacttgtactatctctcaaagactattaacggttctggacagggccaacaaacgctaaaattcagtgtggccggacccagcaacatggctgtccagggaagaaactacatacctggacccagctaccgacaacaacgtgtctcaaccactgtgacttttaacaacaacagcgaatttgcttggcctggagcttcttcttgggctctcaatggacgtaatagcttgatgaatcctggacctgctatggccagccacaaagaaggagaggaccgtttctttcctttgtctggatctttaatttttggcaaacaaggaactggaagagacaacgtggatgcggacaaagtcatgataaccaacgaagaagaaattaaaactactaacccggtagcaacggagtcctatggacaagtggccacaaaccaccagagtgcccgggcacaggcgcagaccggctgggttcaaaaccaaggaatacttccgggtatggtttggcaggacagagatgtgtacctgcaaggacccatttgggccaaaattcctcacacggacggcaactttcacccttctccgctgatgggagggtttggaatgaagcacccgcctcctcagatcctcatcaaaaacacacctgtacctgcggatcctccaacggccttcaacaagggcaagctgaactctttcatcacccagtattctactggccaagtcagcgtggagatcgagtgggagctgcagaaggaaaacagcaagcgctggaacccggagatccagtacacttccaactattacaagtctaataatgttgaatttgctgttaatactgaaggtgtatatagtgaaccccgccccattggcaccagatacctgactcgtaatctg

SEQ ID NO: 884 - protein, 736 aa, synthetic construct
  REGION 1..736: note = Adeno Associated Virus Capsid Protein Variant
MAADGYLPDWLEDNLSEGIREWWALKPGAPQPKANQQHQDNARGLVLPGYKYLGPGNGLDKGEPVNAADAAALEHDKAYDQQLKAGDNPYLKYNHADAEFQERLKEDTSFGGNLGRAVFQAKKRLLEPLGLVEEAAKTAPGKKRPVEQSPQEPDSSAGIGKSGAQPAKKRLNFGQTGDTESVPDPQPIGEPPAAPSGVGSLTMASGGGAPVADNNEGADGVGSSSGNWHCDSQWLGDRVITTSTRTWALPTYNNHIYKQISNSTSGGSSNDNAYFGYSTPWGYFDFNRFHCHFSPRDWQRLINNNWGFRPKRLNFKLFNIQVKEVTDNNGVKTIANNLTSTVQVFTDSDYQLPYVLGSAHEGCLPPFPADVFMIPQYGYLTLNDGSQAVGRSSFYCLEYFPSQMLRTGNNFQFSYEFENVPFHSSYAHSQSLDRLMNPLIDQYLYYLSKTINGSGQGQQTLKFSVAGPSNMAVQGRNYIPGPSYRQQRVSTTVTFNNNSEFAWPGASSWALNGRNSLMNPGPAMASHKEGEDRFFPLSGSLIFGKQGTGRDNVDADKVMITNEEEIKTTNPVATESYGQVATNHQSARAQAQTGWVQNQGILPGMVWQDRDVYLQGPIWAKIPHTDGNFHPSPLMGGFGMKHPPPQILIKNTPVPADPPTAFNKGKLNSFITQYSTGQVSVEIEWELQKENSKRWNPEIQYTSNYYKSNNVEFAVNTEGVYSEPRPIGTRYLTRNL

SEQ ID NO: 885 - DNA, 2208 bp, synthetic construct
  misc_feature 1..2208: note = Adeno Associated Virus Capsid Protein Variant
  source 1..2208: mol_type = other DNA
atggctgccgatggttatcttccagattggctcgaggacaaccttagtgaaggaattcgcgagtggtgggctttgaaacctggagcccctcaacccaaggcaaatcaacaacatcaagacaacgctcgaggtcttgtgcttccgggttacaaataccttggacccggcaacggactcgacaagggggagccggtcaacgcagcagacgcggcggccctcgagcacgacaaggcctacgaccagcagctcaaggccggagacaacccgtacctcaagtacaaccacgccgacgccgagttccaggagcggctcaaagaagatacgtcttttgggggcaacctcgggcgagcagtcttccaggccaaaaagaggcttcttgaacctcttggtctggttgaggaagcggctaagacggctcctggaaagaagaggcctgtagagcagtctcctcaggaaccggactcctccgcgggtattggcaaatcgggtgcacagcccgctaaaaagagactcaatttcggtcagactggcgacacagagtcagtcccagaccctcaaccaatcggagaacctcccgcagccccctcaggtgtgggatctcttacaatggcttcaggtggtggcgcaccagtggcagacaataacgaaggtgccgatggagtgggtagttcctcgggaaattggcattgcgattcccaatggctgggggacagagtcatcaccaccagcacccgaacctgggccctgcccacctacaacaatcacctctacaagcaaatctccaacagcacatctggaggatcttcaaatgacaacgcctacttcggctacagcaccccctgggggtattttgacttcaacagattccactgccacttctcaccacgtgactggcagcgactcatcaacaacaactggggattccggcctaagcgactcaacttcaagctcttcaacattcaggtcaaagaggttacggacaacaatggagtcaagaccgtcgccaataaccttaccagcacggtccaggtcttcacggactcagactatcagctcccgtacgtgctcgggtcggctcacgagggctgcctcccgccgttcccagcggacgttttcatgattcctcagtacgggtatctgacgcttaatgatggaagccaggccgtgggtcgttcgtccttttactgcctggaatatttcccgtcgcaaatgctaagaacgggtaacaacttccagttcagctacgagtttgagaacgtacctttccatagcagctacgctcacagccaaagcctggaccgactaatgaatccactcatcgaccaatacttgtactatctctcaaagactattaacggttctggacagggccaacaaacgctaaaattcagtgtggccggacccagcaacatggctgtccagggaagaaactacatacctggacccagctaccgacaacaacgtgtctcaaccactgtgacttttaacaacaacagcgaatttgcttggcctggagcttcttcttgggctctcaatggacgtaatagcttgatgaatcctggacctgctatggccagccacaaagaaggagaggaccgtttctttcctttgtctggatctttaatttttggcaaacaaggaactggaagagacaacgtggatgcggacaaagtcatgataaccaacgaagaagaaattaaaactactaacccggtagcaacggagtcctatggacaagtggccacaaaccaccagagtgcccgggcacaggcgcagaccggctgggttcaaaaccaaggaatacttccgggtatggtttggcaggacagagatgtgtacctgcaaggacccatttgggccaaaattcctcacacggacggcaactttcacccttctccgctgatgggagggtttggaatgaagcacccgcctcctcagatcctcatcaaaaacacacctgtacctgcggatcctccaacggccttcaacaagggcaagctgaactctttcatcacccagtattctactggccaagtcagcgtggagatcgagtgggagctgcagaaggaaaacagcaagcgctggaacccggagatccagtacacttccaactattacaagtctaataatgttgaatttgctgttaatactgaaggtgtatatagtgaaccccgccccattggcaccagatacctgactcgtaatctg

SEQ ID NO: 886 - protein, 736 aa, synthetic construct
  REGION 1..736: note = Adeno Associated Virus Capsid Protein Variant
MAADGYLPDWLEDNLSEGIREWWALKPGAPQPKANQQHQDNARGLVLPGYKYLGPGNGLDKGEPVNAADAAALEHDKAYDQQLKAGDNPYLKYNHADAEFQERLKEDTSFGGNLGRAVFQAKKRLLEPLGLVEEAAKTAPGKKRPVEQSPQEPDSSAGIGKSGAQPAKKRLNFGQTGDTESVPDPQPIGEPPAAPSGVGSLTMASGGGAPVADNNEGADGVGSSSGNWHCDSQWLGDRVITTSTRTWALPTYNNHLYKQISNSTSGGSSNDNAYFGYSTPWGYFDFNRFHCHFSPRDWQRLINNNWGFRPKRLNFKLFNIQVKEVTDNNGVKTVANNLTSTVQVFTDSDYQLPYVLGSAHEGCLPPFPADVFMIPQYGYLTLNDGSQAVGRSSFYCLEYFPSQMLRTGNNFQFSYEFENVPFHSSYAHSQSLDRLMNPLIDQYLYYLSKTINGSGQGQQTLKFSVAGPSNMAVQGRNYIPGPSYRQQRVSTTVTFNNNSEFAWPGASSWALNGRNSLMNPGPAMASHKEGEDRFFPLSGSLIFGKQGTGRDNVDADKVMITNEEEIKTTNPVATESYGQVATNHQSARAQAQTGWVQNQGILPGMVWQDRDVYLQGPIWAKIPHTDGNFHPSPLMGGFGMKHPPPQILIKNTPVPADPPTAFNKGKLNSFITQYSTGQVSVEIEWELQKENSKRWNPEIQYTSNYYKSNNVEFAVNTEGVYSEPRPIGTRYLTRNL

SEQ ID NO: 887 - DNA, 2208 bp, synthetic construct
  misc_feature 1..2208: note = Adeno Associated Virus Capsid Protein Variant
  source 1..2208: mol_type = other DNA
atggctgccgatggttatcttccagattggctcgaggacaaccttagtgaaggaattcgcgagtggtgggctttgaaacctggagcccctcaacccaaggcaaatcaacaacatcaagacaacgctcgaggtcttgtgcttccgggttacaaataccttggacccggcaacggactcgacaaggggcagccggtcaacgcagcagacgcggcggccctcgagcacgacaaggcctacgaccagcagctcaaggccggagacaacccgtacctcaagtacaaccacgccgacgccgagttccaggagcggctcaaagaagatacgtcttttgggggcaacctcgggcgagcagtcttccaggccaaaaagaggcttcttgaacctcttggtctggttgaggaagcggctaagacggctcctggaaagaagaggcctgtagagcagtctcctcaggaaccggactcctccgcgggtattggcaaatcgggtgcacagcccgctaaaaagagactcaatttcggtcagactggcgacacagagtcagtcccagaccctcaaccaatcggagaacctcccgcagccccctcaggtgtgggatctcttacaatggcttcaggtggtggcgcaccagtggcagacaataacgaaggtgccgatggagtgggtagttcctcgggaaattggcattgcgattcccaatggctgggggacagagtcatcaccaccagcacccgaacctgggccctgcccacctacaacaatcacctctacaagcaaatctccaacagcacatctggaggatcttcaaatgacaacgcctacttcggctacagcaccccctgggggtattttgacttcaacagattccactgccacttctcaccacgtgactggcagcgactcatcaacaacaactggggattccggcctaagcgactcaacttcaagctcttcaacattcaggtcaaagaggttacggacaacaatggagtcaagaccatcgccaataaccttaccagcacggtccaggtcttcacggactcagactatcagctcccgtacgtgctcgggtcggctcacgagggctgcctcccgccgttcccagcggacgttttcatgattcctcagtacgggtatctgacgcttaatgatggaagccaggccgtgggtcgttcgtccttttactgcctggaatatttcccgtcgcaaatgctaagaacgggtaacaacttccagttcagctacgagtttgagaacgtacctttccatagcagctacgctcacagccaaagcctggaccgactaatgaatccactcatcgaccaatacttgtactatctctcaaagactattaacggttctggacagggccaacaaacgctaaaattcagtgtggccggacccagcaacatggctgtccagggaagaaactacatacctggacccagctaccgacaacaacgtgtctcaaccactgtgacttttaacaacaacagcgaatttgcttggcctggagcttcttcttgggctctcaatggacgtaatagcttgatgaatcctggacctgctatggccagccacaaagaaggagaggaccgtttctttcctttgtctggatctttaatttttggcaaacaaggaactggaagagacaacgtggatgcggacaaagtcatgataaccaacgaagaagaaattaaaactactaacccggtagcaacggagtcctatggacaagtggccacaaaccaccagagtgcccgggcacaggcgcagaccggctgggttcaaaaccaaggaatacttccgggtatggtttggcaggacagagatgtgtacctgcaaggacccatttgggccaaaattcctcacacggacggcaactttcacccttctccgctgatgggagggtttggaatgaagcacccgcctcctcagatcctcatcaaaaacacacctgtacctgcggatcctccaacggccttcaacaagggcaagctgaactctttcatcacccagtattctactggccaagtcagcgtggagatcgagtgggagctgcagaaggaaaacagcaagcgctggaacccggagatccagtacacttccaactattacaagtctaataatgttgaatttgctgttaatactgaaggtgtatatagtgaaccccgccccattggcaccagatacctgactcgtaatctg

SEQ ID NO: 888 - protein, 736 aa, synthetic construct
  REGION 1..736: note = Adeno Associated Virus Capsid Protein Variant
MAADGYLPDWLEDNLSEGIREWWALKPGAPQPKANQQHQDNARGLVLPGYKYLGPGNGLDKGQPVNAADAAALEHDKAYDQQLKAGDNPYLKYNHADAEFQERLKEDTSFGGNLGRAVFQAKKRLLEPLGLVEEAAKTAPGKKRPVEQSPQEPDSSAGIGKSGAQPAKKRLNFGQTGDTESVPDPQPIGEPPAAPSGVGSLTMASGGGAPVADNNEGADGVGSSSGNWHCDSQWLGDRVITTSTRTWALPTYNNHLYKQISNSTSGGSSNDNAYFGYSTPWGYFDFNRFHCHFSPRDWQRLINNNWGFRPKRLNFKLFNIQVKEVTDNNGVKTIANNLTSTVQVFTDSDYQLPYVLGSAHEGCLPPFPADVFMIPQYGYLTLNDGSQAVGRSSFYCLEYFPSQMLRTGNNFQFSYEFENVPFHSSYAHSQSLDRLMNPLIDQYLYYLSKTINGSGQGQQTLKFSVAGPSNMAVQGRNYIPGPSYRQQRVSTTVTFNNNSEFAWPGASSWALNGRNSLMNPGPAMASHKEGEDRFFPLSGSLIFGKQGTGRDNVDADKVMITNEEEIKTTNPVATESYGQVATNHQSARAQAQTGWVQNQGILPGMVWQDRDVYLQGPIWAKIPHTDGNFHPSPLMGGFGMKHPPPQILIKNTPVPADPPTAFNKGKLNSFITQYSTGQVSVEIEWELQKENSKRWNPEIQYTSNYYKSNNVEFAVNTEGVYSEPRPIGTRYLTRNL

SEQ ID NO: 889 - DNA, 2208 bp, synthetic construct
  misc_feature 1..2208: note = Adeno Associated Virus Capsid Protein Variant
  source 1..2208: mol_type = other DNA
atggctgccgatggttatcttccagattggctcgaggacaaccttagtgaaggaattcgcgagtggtgggctttgaaacctggagcccctcaacccaaggcaaatcaacaacatcaagacaacgctcgaggtcttgtgcttccgggttacaaataccttggacccggcaacggactcgacaagggggagccggtcaacgcagcagacgcggcggccctcgagcacgacaaggcctacgaccagcagctcaaggccggagacaacccgtacctcaagtacaaccacgccgacgccgagttccaggagcggctcaaagaagatacgtcttttgggggcaacctcgggcgagcagtcttccaggccaaaaagaggcttcttgaacctcttggtctggttgaggaagcggctaagacggctcctggaaagaagaggcctgtagagcagtctcctcaggaaccggactcctccgcgggtattggcaaatcgggtgcacagcccgctaaaaagagactcaatttcggtcagactggcgacacagagtcagtcccagaccctcaaccaatcggagaacctcccgcagccccctcaggtgtgggatctcttacaatggcttcaggtggtggcgcaccaatggcagacaataacgaaggtgccgatggagtgggtagttcctcgggaaattggcattgcgattcccaatggctgggggacagagtcatcaccaccagcacccgaacctgggccctgcccacctacaacaatcacctctacaagcaaatctccaacagcacatctggaggatcttcaaatgacaacgcctacttcggctacagcaccccctgggggtattttgacttcaacagattccactgccacttctcaccacgtgactggcagcgactcatcaacaacaactggggattccggcctaagcgactcaacttcaagctcttcaacattcaggtcaaagaggttacggacaacaatggagtcaagaccatcgccaataaccttaccagcacggtccaggtcttcacggactcagactatcagctcccgtacgtgctcgggtcggctcacgagggctgcctcccgccgttcccagcggacgttttcatgattcctcagtacgggtatctgacgcttaatgatggaagccaggccgtgggtcgttcgtccttttactgcctggaatatttcccgtcgcaaatgctaagaacgggtaacaacttccagttcagctacgagtttgagaacgtacctttccatagcagctacgctcacagccaaagcctggaccgactaatgaatccactcatcgaccaatacttgtactatctctcaaagactattaacggttctggacagggccaacaaacgctaaaattcagtgtggccggacccagcaacatggctgtccagggaagaaactacatacctggacccagctaccgacaacaacgtgtctcaaccactgtgacttttaacaacaacagcgaatttgcttggcctggagcttcttcttgggctctcaatggacgtaatagcttgatgaatcctggacctgctatggccagccacaaagaaggagaggaccgtttctttcctttgtctggatctttaatttttggcaaacaaggaactggaagagacaacgtggatgcggacaaagtcatgataaccaacgaagaagaaattaaaactactaacccggtagcaacggagtcctatggacaagtggccacaaaccaccagagtgcccgggcacaggcgcagaccggctgggttcaaaaccaaggaatacttccgggtatggtttggcaggacagagatgtgtacctgcaaggacccatttgggccaaaattcctcacacggacggcaactttcacccttctccgctgatgggagggtttggaatgaagcacccgcctcctcagatcctcatcaaaaacacacctgtacctgcggatcctccaacggccttcaacaagggcaagctgaactctttcatcacccagtattctactggccaagtcagcgtggagatcgagtgggagctgcagaaggaaaacagcaagcgctggaacccggagatccagtacacttccaactattacaagtctaataatgttgaatttgctgttaatactgaaggtgtatatagtgaaccccgccccattggcaccagatacctgactcgtaatctg

SEQ ID NO: 890 - protein, 736 aa, synthetic construct
  REGION 1..736: note = Adeno Associated Virus Capsid Protein Variant
MAADGYLPDWLEDNLSEGIREWWALKPGAPQPKANQQHQDNARGLVLPGYKYLGPGNGLDKGEPVNAADAAALEHDKAYDQQLKAGDNPYLKYNHADAEFQERLKEDTSFGGNLGRAVFQAKKRLLEPLGLVEEAAKTAPGKKRPVEQSPQEPDSSAGIGKSGAQPAKKRLNFGQTGDTESVPDPQPIGEPPAAPSGVGSLTMASGGGAPMADNNEGADGVGSSSGNWHCDSQWLGDRVITTSTRTWALPTYNNHLYKQISNSTSGGSSNDNAYFGYSTPWGYFDFNRFHCHFSPRDWQRLINNNWGFRPKRLNFKLFNIQVKEVTDNNGVKTIANNLTSTVQVFTDSDYQLPYVLGSAHEGCLPPFPADVFMIPQYGYLTLNDGSQAVGRSSFYCLEYFPSQMLRTGNNFQFSYEFENVPFHSSYAHSQSLDRLMNPLIDQYLYYLSKTINGSGQGQQTLKFSVAGPSNMAVQGRNYIPGPSYRQQRVSTTVTFNNNSEFAWPGASSWALNGRNSLMNPGPAMASHKEGEDRFFPLSGSLIFGKQGTGRDNVDADKVMITNEEEIKTTNPVATESYGQVATNHQSARAQAQTGWVQNQGILPGMVWQDRDVYLQGPIWAKIPHTDGNFHPSPLMGGFGMKHPPPQILIKNTPVPADPPTAFNKGKLNSFITQYSTGQVSVEIEWELQKENSKRWNPEIQYTSNYYKSNNVEFAVNTEGVYSEPRPIGTRYLTRNL

SEQ ID NO: 891 - DNA, 2208 bp, synthetic construct
  misc_feature 1..2208: note = Adeno Associated Virus Capsid Protein Variant
  source 1..2208: mol_type = other DNA
atggctgccgatggttatcttccagattggctcgaggacaaccttagtgaaggaattcgcgagtggtgggctttgaaacctggagcccctcaacccaaggcaaatcaacaacatcaagacaacgctcgaggtcttgtgcttccgggttacaaataccttggacccggcaacggactcgacaagggggagccggtcaacgcagcagacgcggcggccctcgagcacgacaaggcctacgaccagcagctcaaggccggagacaacccgtacctcaagtacaaccacgccgacgccgagttccaggagcggctcaaagaagatacgtcttttgggggcaacctcgggcgagcagtcttccaggccaaaaagaggcttcttgaacctcttggtctggttgaggaagcggctaagacggctcctggaaagaagaggcctgtagagcagtctcctcaggaaccggactcctccgcgggtattggcaaatcgggtgcacagcccgctaaaaagagactcaatttcggtcagactggcgacacagagtcagtcccagaccctcaaccaatcggagaacctcccgcagccccctcaggtgtgggatctcttacaatggcttcaggtggtggcgcaccagtggcagacaataacgaaggtgccgatggagtgggtagttcctcgggaaattggcattgcgattcccaatggctgggggacagagtcatcaccaccagcacccgaacctgggccctgcccacctacaacaatcacctctacaagcaaatctccaacagctcatctggaggatcttcaaatgacaacgcctacttcggctacagcaccccctgggggtattttgacttcaacagattccactgccacttctcaccacgtgactggcagcgactcatcaacaacaactggggattccggcctaagcgactcaacttcaagctcttcaacattcaggtcaaagaggttacggacaacaatggagtcaagaccatcgccaataaccttaccagcacggtccaggtcttcacggactcagactatcagctcccgtacgtgctcgggtcggctcacgagggctgcctcccgccgttcccagcggacgttttcatgattcctcagtacgggtatctgacgcttaatgatggaagccaggccgtgggtcgttcgtccttttactgcctggaatatttcccgtcgcaaatgctaagaacgggtaacaacttccagttcagctacgagtttgagaacgtacctttccatagcagctacgctcacagccaaagcctggaccgactaatgaatccactcatcgaccaatacttgtactatctctcaaagactattaacggttctggacagggccaacaaacgctaaaattcagtgtggccggacccagcaacatggctgtccagggaagaaactacatacctggacccagctaccgacaacaacgtgtctcaaccactgtgacttttaacaacaacagcgaatttgcttggcctggagcttcttcttgggctctcaatggacgtaatagcttgatgaatcctggacctgctatggccagccacaaagaaggagaggaccgtttctttcctttgtctggatctttaatttttggcaaacaaggaactggaagagacaacgtggatgcggacaaagtcatgataaccaacgaagaagaaattaaaactactaacccggtagcaacggagtcctatggacaagtggccacaaaccaccagagtgcccgggcacaggcgcagaccggctgggttcaaaaccaaggaatacttccgggtatggtttggcaggacagagatgtgtacctgcaaggacccatttgggccaaaattcctcacacggacggcaactttcacccttctccgctgatgggagggtttggaatgaagcacccgcctcctcagatcctcatcaaaaacacacctgtacctgcggatcctccaacggccttcaacaagggcaagctgaactctttcatcacccagtattctactggccaagtcagcgtggagatcgagtgggagctgcagaaggaaaacagcaagcgctggaacccggagatccagtacacttccaactattacaagtctaataatgttgaatttgctgttaatactgaaggtgtatatagtgaaccccgccccattggcaccagatacctgactcgtaatctg

SEQ ID NO: 892 - protein, 736 aa, synthetic construct
  REGION 1..736: note = Adeno Associated Virus Capsid Protein Variant
MAADGYLPDWLEDNLSEGIREWWALKPGAPQPKANQQHQDNARGLVLPGYKYLGPGNGLDKGEPVNAADAAALEHDKAYDQQLKAGDNPYLKYNHADAEFQERLKEDTSFGGNLGRAVFQAKKRLLEPLGLVEEAAKTAPGKKRPVEQSPQEPDSSAGIGKSGAQPAKKRLNFGQTGDTESVPDPQPIGEPPAAPSGVGSLTMASGGGAPVADNNEGADGVGSSSGNWHCDSQWLGDRVITTSTRTWALPTYNNHLYKQISNSSSGGSSNDNAYFGYSTPWGYFDFNRFHCHFSPRDWQRLINNNWGFRPKRLNFKLFNIQVKEVTDNNGVKTIANNLTSTVQVFTDSDYQLPYVLGSAHEGCLPPFPADVFMIPQYGYLTLNDGSQAVGRSSFYCLEYFPSQMLRTGNNFQFSYEFENVPFHSSYAHSQSLDRLMNPLIDQYLYYLSKTINGSGQGQQTLKFSVAGPSNMAVQGRNYIPGPSYRQQRVSTTVTFNNNSEFAWPGASSWALNGRNSLMNPGPAMASHKEGEDRFFPLSGSLIFGKQGTGRDNVDADKVMITNEEEIKTTNPVATESYGQVATNHQSARAQAQTGWVQNQGILPGMVWQDRDVYLQGPIWAKIPHTDGNFHPSPLMGGFGMKHPPPQILIKNTPVPADPPTAFNKGKLNSFITQYSTGQVSVEIEWELQKENSKRWNPEIQYTSNYYKSNNVEFAVNTEGVYSEPRPIGTRYLTRNL

SEQ ID NO: 893 - DNA, 2208 bp, synthetic construct
  misc_feature 1..2208: note = Adeno Associated Virus Capsid Protein Variant
  source 1..2208: mol_type = other DNA
atggctgccgatggttatcttccagattggctcgaggacaaccttagtgaaggaattcgcgagtggtgggctttgaaacctggagcccctcaacccaaggcaaatcaacaacatcaagacaacgctcgaggtcttgtgcttccgggttacaaataccttggacccggcaacggactcagtaagggggagccggtcaacgcagcagacgcggcggccctcgagcacgacaaggcctacgaccagcagctcaaggccggagacaacccgtacctcaagtacaaccacgccgacgccgagttccaggagcggctcaaagaagatacgtcttttgggggcaacctcgggcgagcagtcttccaggccaaaaagaggcttcttgaacctcttggtctggttgaggaagcggctaagacggctcctggaaagaagaggcctgtagagcagtctcctcaggaaccggactcctccgcgggtattggcaaatcgggtgcacagcccgctaaaaagagactcaatttcggtcagactggcgacacagagtcagtcccagaccctcaaccaatcggagaacctcccgcagccccctcaggtgtgggatctcttacaatggcttcaggtggtggcgcaccagtggcagacaataacgaaggtgccgatggagtgggtagttcctcgggaaattggcattgcgattcccaatggctgggggacagagtcatcaccaccagcacccgaacctgggccctgcccacctacaacaatcacctctacaagcaaatctccaacagcacatctggaggatcttcaaatgacaacgcctacttcggctacagcaccccctgggggtattttgacttcaacagattccactgccacttctcaccacgtgactggcagcgactcatcaacaacaactggggattccggcctaagcgactcaacttcaagctcttcaacattcaggtcaaagaggttacggacaacaatggagtcaagaccatcgccaataaccttaccagcacggtccaggtcttcacggactcagactatcagctcccgtacgtgctcgggtcggctcacgagggctgcctcccgccgttcccagcggacgttttcatgattcctcagtacgggtatctgacgcttaatgatggaagccaggccgtgggtcgttcgtccttttactgcctggaatatttcccgtcgcaaatgctaagaacgggtaacaacttccagttcagctacgagtttgagaacgtacctttccatagcagctacgctcacagccaaagcctggaccgactaatgaatccactcatcgaccaatacttgtactatctctcaaagactattaacggttctggacagggccaacaaacgctaaaattcagtgtggccggacccagcaacatggctgtccagggaagaaactacatacctggacccagctaccgacaacaacgtgtctcaaccactgtgacttttaacaacaacagcgaatttgcttggcctggagcttcttcttgggctctcaatggacgtaatagcttgatgaatcctggacctgctatggccagccacaaagaaggagaggaccgtttctttcctttgtctggatctttaatttttggcaaacaaggaactggaagagacaacgtggatgcggacaaagtcatgataaccaacgaagaagaaattaaaactactaacccggtagcaacggagtcctatggacaagtggccacaaaccaccagagtgcccgggcacaggcgcagaccggctgggttcaaaaccaaggaatacttccgggtatggtttggcaggacagagatgtgtacctgcaaggacccatttgggccaaaattcctcacacggacggcaactttcacccttctccgctgatgggagggtttggaatgaagcacccgcctcctcagatcctcatcaaaaacacacctgtacctgcggatcctccaacggccttcaacaagggcaagctgaactctttcatcacccagtattctactggccaagtcagcgtggagatcgagtgggagctgcagaaggaaaacagcaagcgctggaacccggagatccagtacacttccaactattacaagtctaataatgttgaatttgctgttaatactgaaggtgtatatagtgaaccccgccccattggcaccagatacctgactcgtaatctg

SEQ ID NO: 894 - protein, 736 aa, synthetic construct
  REGION 1..736: note = Adeno Associated Virus Capsid Protein Variant
MAADGYLPDWLEDNLSEGIREWWALKPGAPQPKANQQHQDNARGLVLPGYKYLGPGNGLSKGEPVNAADAAALEHDKAYDQQLKAGDNPYLKYNHADAEFQERLKEDTSFGGNLGRAVFQAKKRLLEPLGLVEEAAKTAPGKKRPVEQSPQEPDSSAGIGKSGAQPAKKRLNFGQTGDTESVPDPQPIGEPPAAPSGVGSLTMASGGGAPVADNNEGADGVGSSSGNWHCDSQWLGDRVITTSTRTWALPTYNNHLYKQISNSTSGGSSNDNAYFGYSTPWGYFDFNRFHCHFSPRDWQRLINNNWGFRPKRLNFKLFNIQVKEVTDNNGVKTIANNLTSTVQVFTDSDYQLPYVLGSAHEGCLPPFPADVFMIPQYGYLTLNDGSQAVGRSSFYCLEYFPSQMLRTGNNFQFSYEFENVPFHSSYAHSQSLDRLMNPLIDQYLYYLSKTINGSGQGQQTLKFSVAGPSNMAVQGRNYIPGPSYRQQRVSTTVTFNNNSEFAWPGASSWALNGRNSLMNPGPAMASHKEGEDRFFPLSGSLIFGKQGTGRDNVDADKVMITNEEEIKTTNPVATESYGQVATNHQSARAQAQTGWVQNQGILPGMVWQDRDVYLQGPIWAKIPHTDGNFHPSPLMGGFGMKHPPPQILIKNTPVPADPPTAFNKGKLNSFITQYSTGQVSVEIEWELQKENSKRWNPEIQYTSNYYKSNNVEFAVNTEGVYSEPRPIGTRYLTRNL

SEQ ID NO: 895 - DNA, 2208 bp, synthetic construct
  misc_feature 1..2208: note = Adeno Associated Virus Capsid Protein Variant
  source 1..2208: mol_type = other DNA
atggctgccgatggttatcttccagattggctcgaggacaaccttagtgaaggaattcgcgagtggtgggctttgaaacctggagcccctcaacccaaggcaaatcaacaacatcaagacaacgctcgaggtcttgtgcttccgggttacaaataccttggacccggcaacggactcgacaagggggagccggtcaacgcagcagacgcggcggccctcgagcacgacaaggcccacgaccagcagctcaaggccggagacaacccgtacctcaagtacaaccacgccgacgccgagttccaggagcggctcaaagaagatacgtcttttgggggcaacctcgggcgagcagtcttccaggccaaaaagaggcttcttgaacctcttggtctggttgaggaagcggctaagacggctcctggaaagaagaggcctgtagagcagtctcctcaggaaccggactcctccgcgggtattggcaaatcgggtgcacagcccgctaaaaagagactcaatttcggtcagactggcgacacagagtcagtcccagaccctcaaccaatcggagaacctcccgcagccccctcaggtgtgggatctcttacaatggcttcaggtggtggcgcaccagtggcagacaataacgaaggtgccgatggagtgggtagttcctcgggaaattggcattgcgattcccaatggctgggggacagagtcatcaccaccagcacccgaacctgggccctgcccacctacaacaatcacctctacaagcaaatctccaacagcacatctggaggatcttcaaatgacggggcctacttcggctacagcaccccctgggggtattttgacttcaacagattccactgccacttctcaccacgtgactggcagcgactcatcaacaacaactggggattccggcctaagcgactcaacttcaagctcttcaacattcaggtcaaagaggttacggacaacaatggagtcaagaccatcgccaataaccttaccagcacggtccaggtcttcacggactcagactatcagctcccgtacgtgctcgggtcggctcacgagggctgcctcccgccgttcccagcggacgttttcatgattcctcagtacgggtatctgacgcttaatgatggaagccaggccgtgggtcgttcgtccttttactgcctggaatatttcccgtcgcaaatgctaagaacgggtaacaacttccagttcagctacgagtttgagaacgtacctttccatagcagctacgctcacagccaaagcctggaccgactaatgaatccactcatcgaccaatacttgtactatctctcaaagactattaacggttctggacagggccaacaaacgctaaaattcagtgtggccggacccagcaacatggctgtccagggaagaaactacatacctggacccagctaccgacaacaacgtgtctcaaccactgtgacttttaacaacaacagcgaatttgcttggcctggagcttcttcttgggctctcaatggacgtaatagcttgatgaatcctggacctgctatggccagccacaaagaaggagaggaccgtttctttcctttgtctggatctttaatttttggcaaacaaggaactggaagagacaacgtggatgcggacaaagtcatgataaccaacgaagaagaaattaaaactactaacccggtagcaacggagtcctatggacaagtggccacaaaccaccagagtgcccgggcacaggcgcagaccggctgggttcaaaaccaaggaatacttccgggtatggtttggcaggacagagatgtgtacctgcaaggacccatttgggccaaaattcctcacacggacggcaactttcacccttctccgctgatgggagggtttggaatgaagcacccgcctcctcagatcctcatcaaaaacacacctgtacctgcggatcctccaacggccttcaacaagggcaagctgaactctttcatcacccagtattctactggccaagtcagcgtggagatcgagtgggagctgcagaaggaaaacagcaagcgctggaacccggagatccagtacacttccaactattacaagtctaataatgttgaatttgctgttaatactgaaggtgtatatagtgaaccccgccccattggcaccagatacctgactcgtaatctg

SEQ ID NO: 896 - protein, 736 aa, synthetic construct
  REGION 1..736: note = Adeno Associated Virus Capsid Protein Variant
MAADGYLPDWLEDNLSEGIREWWALKPGAPQPKANQQHQDNARGLVLPGYKYLGPGNGLDKGEPVNAADAAALEHDKAHDQQLKAGDNPYLKYNHADAEFQERLKEDTSFGGNLGRAVFQAKKRLLEPLGLVEEAAKTAPGKKRPVEQSPQEPDSSAGIGKSGAQPAKKRLNFGQTGDTESVPDPQPIGEPPAAPSGVGSLTMASGGGAPVADNNEGADGVGSSSGNWHCDSQWLGDRVITTSTRTWALPTYNNHLYKQISNSTSGGSSNDGAYFGYSTPWGYFDFNRFHCHFSPRDWQRLINNNWGFRPKRLNFKLFNIQVKEVTDNNGVKTIANNLTSTVQVFTDSDYQLPYVLGSAHEGCLPPFPADVFMIPQYGYLTLNDGSQAVGRSSFYCLEYFPSQMLRTGNNFQFSYEFENVPFHSSYAHSQSLDRLMNPLIDQYLYYLSKTINGSGQGQQTLKFSVAGPSNMAVQGRNYIPGPSYRQQRVSTTVTFNNNSEFAWPGASSWALNGRNSLMNPGPAMASHKEGEDRFFPLSGSLIFGKQGTGRDNVDADKVMITNEEEIKTTNPVATESYGQVATNHQSARAQAQTGWVQNQGILPGMVWQDRDVYLQGPIWAKIPHTDGNFHPSPLMGGFGMKHPPPQILIKNTPVPADPPTAFNKGKLNSFITQYSTGQVSVEIEWELQKENSKRWNPEIQYTSNYYKSNNVEFAVNTEGVYSEPRPIGTRYLTRNL

SEQ ID NO: 897 - DNA, 2208 bp, synthetic construct
  misc_feature 1..2208: note = Adeno Associated Virus Capsid Protein Variant
  source 1..2208: mol_type = other DNA
atggctgccgatggttatcttccagattggctcgaggacaaccttagtgaaggaattcgcgagtggtgggctttgaaacctggagcccctcaacccaaggcaaatcaacaacatcaagacaacgctcgaggtcttgtgcttccgggttacaaataccttggacccggcaacggactcgacaagggggagccggtcaacgcagcagacgcggcggccctcgagcacgacaaggcctacgaccagcagctcaaggccggagacaacccgtacctcaagtacaaccacgccgacgccgagttccaggagcggctcaaagaagatacgtcttttgggggcaacctcgggcgagcagtcttccaggccaaaaagaggcttcttgaacctcttggtctggttgaggaagcggctaagacggctcctggaaagaagaggcctgtagagcagtctcctcaggaaccggactcctccgcgggtattggcaaatcgggtgcacagcccgctaaaaagagactcaatttcggtcagactggcgacacagagtcagtcccagaccctcaaccaatcggagaacctcccgcagccccctcaggtgtgggatctcttacaatggcttcaggtggtggcgcaccagtggcagacaataacgaaggtgccgatggagtgggtagttcctcgggaaattggcattgcgattcccaatggctgggggacagagtcatcaccaccagcacccgaacctgggccctgcccacctacaacaatcacctctacaagcaaatctccaacagcacatctggaggatcttcaaatgacaacgcctacttcggctacagcaccccctgggggtattttgacttcaacagattccactgccacttctcaccacgtgactggcagcgactcatcaacaacaactggggattccggcctaagcgactcaacttcaagctcttcaacattcaggtcaaagaggttacggacaacaatggagtcaagaccatcgccaataaccttaccagcacggtccaggtcttcacggactcagactatcagctcccgtacgtgctcgggtcggctcacgagggctgcctcccgccgttcccagcggacgttttcatgattcctcagtacgggtatctgacgcttaatgatggaagccaggccgtgggtcgttcgtccttttactgcctggaatatttcccgtcgcaaatgctaagaacgggtaacaacttccagttcagctacgagtttgagaacgtacctttccatagcagctacgctcacagccaaagcctggaccgactaatgaatccactcatcgaccaatacttgtactatctctcaaagactattaacggttctggacagggccaacaaacgctaaaattcagtgtggccggacccagcaacatggctgtccagggaagaaactacatacctggacccagctaccgacaacaacgtgtctcaaccactgtgacttttaacaacaacagcgaatttgcttggcctggagcttcttcttgggctctcaatggacgtaatagcttgatgaatcctggacctgctatggccagccacaaagaaggagaggaccgtttctttcctttgtctggatctttaatttttggcaaacaaggaactggaagagacaacgtggatgcggacaaagtcatgataaccaacgaagaagaaattaaaactactaacccggtagcaacggagtcctatggacaagtggccacaaaccaccagagtgcccgggcacaggcgcagaccatgtgggttcaaaaccaaggaatacttccgggtatggtttggcaggacagagatgtgtacctgcaaggacccatttgggccaaaattcctcacacggacggcaactttcacccttctccgctgatgggagggtttggaatgaagcacccgcctcctcagatcctcatcaaaaacacacctgtacctgcggatcctccaacggccttcaacaagggcaagctgaactctttcatcacccagtattctactggccaagtcagcgtggagatcgagtgggagctgcagaaggaaaacagcaagcgctggaacccggagatccagtacacttccaactattacaagtctaataatgttgaatttgctgttaatactgaaggtgtatatagtgaaccccgccccattggcaccagatacctgactcgtaatctg

SEQ ID NO: 898 - protein, 736 aa, synthetic construct
  REGION 1..736: note = Adeno Associated Virus Capsid Protein Variant
MAADGYLPDWLEDNLSEGIREWWALKPGAPQPKANQQHQDNARGLVLPGYKYLGPGNGLDKGEPVNAADAAALEHDKAYDQQLKAGDNPYLKYNHADAEFQERLKEDTSFGGNLGRAVFQAKKRLLEPLGLVEEAAKTAPGKKRPVEQSPQEPDSSAGIGKSGAQPAKKRLNFGQTGDTESVPDPQPIGEPPAAPSGVGSLTMASGGGAPVADNNEGADGVGSSSGNWHCDSQWLGDRVITTSTRTWALPTYNNHLYKQISNSTSGGSSNDNAYFGYSTPWGYFDFNRFHCHFSPRDWQRLINNNWGFRPKRLNFKLFNIQVKEVTDNNGVKTIANNLTSTVQVFTDSDYQLPYVLGSAHEGCLPPFPADVFMIPQYGYLTLNDGSQAVGRSSFYCLEYFPSQMLRTGNNFQFSYEFENVPFHSSYAHSQSLDRLMNPLIDQYLYYLSKTINGSGQGQQTLKFSVAGPSNMAVQGRNYIPGPSYRQQRVSTTVTFNNNSEFAWPGASSWALNGRNSLMNPGPAMASHKEGEDRFFPLSGSLIFGKQGTGRDNVDADKVMITNEEEIKTTNPVATESYGQVATNHQSARAQAQTMWVQNQGILPGMVWQDRDVYLQGPIWAKIPHTDGNFHPSPLMGGFGMKHPPPQILIKNTPVPADPPTAFNKGKLNSFITQYSTGQVSVEIEWELQKENSKRWNPEIQYTSNYYKSNNVEFAVNTEGVYSEPRPIGTRYLTRNL

SEQ ID NO: 899 - DNA, 2208 bp, synthetic construct
  misc_feature 1..2208: note = Adeno Associated Virus Capsid Protein Variant
  source 1..2208: mol_type = other DNA
atggctgccgatggttatcttccagattggctcgaggacaaccttagtgaaggaattcgcgagtggtgggctttgaaacctggagcccctcaacccaaggcaaatcaacaacatcaagacaacgctcgaggtcttgtgcttccgggttacaaataccttggacccggcaacggactcgacaagggggagccggtcaacgcagcagacgcggcggccctcgagcacgacaaggcctacgaccagcagctcaaggccggagacaacccgtacctcaagtacaaccacgccgacgccgagttccaggagcggctcaaagaagatacgtcttttgggggcaacctcgggcgagcagtcttccaggccaaaaagaggcttcttgaacctcttggtctggttgaggaagcggctaagacggctcctggaaagaagaggcctgtagagcagtctcctcaggaaccggactcctccgcgggtattggcaaatcgggtgcacagcccgctaaaaagagactcaatttcggtcagactggcgacacagagtcagtcccagaccctcaaccaatcggagaacctcccgcagccccctcaggtgtgggatctcttacaatggcttcaggtggtggcgcaccagtggcagacaataacgaaggtgccgatggagtgggtagttcctcgggaaattggcattgcgattcccaatggctgggggacagagtcatcaccaccagcacccgaacctgggccctgcccacctacaacaatcacctctacaagcaaatctccaacagcacatctggaggatcttcaaatgacaacgcctacttcggctacagcaccccctgggggtattttgacttcaacagattccactgccacttctcaccacgtgactggcagcgactcatcaacaacaactggggattccggcctaagcgactcaacttcaagctcttcaacattcaggtcaaagaggttacggacaacaatggagtcaagaccatcgccaataaccttaccagcacggtccaggtcttcacggactcagactatcagctcccgtacgtgctcgggtcggctcacgagggctgcctcccgccgttcccagcggacgttttcatgattcctcagtacgggtatctgacgcttaatgatggaagccaggccgtgggtcgttcgtccttttactgcctggaatatttcccgtcgcaaatgctaagaacgggtaacaacttccagttcagctacgagtttgagaacgtacctttccatagcagctacgctcacagccaaagcctggaccgactaatgaatccactcatcgaccaatacttgtactatctctcaaagactattaacggttctggacagggccaacaaacgctaaaattcagtgtggccggacccagcaacatggctgtccagggaagaaactacatacctggacccagctaccgacaacaacgtgtctcaaccactgtgacttttaacaacaacagcgaatttgcttggcctggagcttcttcttgggctctcaatggacgtaatagcttgatgaatcctggacctgctatggccagccacaaagaaggagaggaccgtttctttcctttgtctggatctttaatttttggcaaacaaggaactggaagagacaacgtggatgcggacaaagtcatgataaccaacgaagaagaaattaaaactactaacccggtagcaacggagtcctatggacaagtggccacaaaccaccagagtgcccgggcacaggcgcagaccggctgggttcaaaaccaaggaatacttccgggtatggtttggcaggacagagatgtgtacctgcaaggacccatttgggccaaaattcctcacacggacggcaactttcacccttctccgctgatgggagggtttggaatgaagcacccgcctcctcagatcctcatcaaaaacacacctgtacctgcggatcctccaacggccttcaacaagggcaagctgaactctttcatcacccagtattctactggccaagtcagcgtggagatcgagtgggagctgcagaaggaaaacagcaagcgctggaacccggagatccagtacacttccaactattacaagtctaataatgttgaatttgctgttaatactgaaggtgtatatagtgaacccgcacccattggcaccagatacctgactcgtaatctg

SEQ ID NO: 900 - protein, 736 aa, synthetic construct
  REGION 1..736: note = Adeno Associated Virus Capsid Protein Variant
MAADGYLPDWLEDNLSEGIREWWALKPGAPQPKANQQHQDNARGLVLPGYKYLGPGNGLDKGEPVNAADAAALEHDKAYDQQLKAGDNPYLKYNHADAEFQERLKEDTSFGGNLGRAVFQAKKRLLEPLGLVEEAAKTAPGKKRPVEQSPQEPDSSAGIGKSGAQPAKKRLNFGQTGDTESVPDPQPIGEPPAAPSGVGSLTMASGGGAPVADNNEGADGVGSSSGNWHCDSQWLGDRVITTSTRTWALPTYNNHLYKQISNSTSGGSSNDNAYFGYSTPWGYFDFNRFHCHFSPRDWQRLINNNWGFRPKRLNFKLFNIQVKEVTDNNGVKTIANNLTSTVQVFTDSDYQLPYVLGSAHEGCLPPFPADVFMIPQYGYLTLNDGSQAVGRSSFYCLEYFPSQMLRTGNNFQFSYEFENVPFHSSYAHSQSLDRLMNPLIDQYLYYLSKTINGSGQGQQTLKFSVAGPSNMAVQGRNYIPGPSYRQQRVSTTVTFNNNSEFAWPGASSWALNGRNSLMNPGPAMASHKEGEDRFFPLSGSLIFGKQGTGRDNVDADKVMITNEEEIKTTNPVATESYGQVATNHQSARAQAQTGWVQNQGILPGMVWQDRDVYLQGPIWAKIPHTDGNFHPSPLMGGFGMKHPPPQILIKNTPVPADPPTAFNKGKLNSFITQYSTGQVSVEIEWELQKENSKRWNPEIQYTSNYYKSNNVEFAVNTEGVYSEPAPIGTRYLTRNL

SEQ ID NO: 901 - DNA, 2208 bp, synthetic construct
  misc_feature 1..2208: note = Adeno Associated Virus Capsid Protein Variant
  source 1..2208: mol_type = other DNA
atggctgccgatggttatcttccagattggctcgaggacaaccttagtgaaggaattcgcgagtggtgggctttgaaacctggagcccctcaacccaaggcaaatcaacaacatcaagacaacgctcgaggtcttgtgcttccgggttacaaataccttggacccggcaacggactcgacaagggggagccggtcaacgcagcagacgcggcggccctcgagcacgacaaggcctacgaccagcagctcaaggccggagacaacccgtacctcaagtacaaccacgccgacgccgagttccaggagcggctcaaagaagatacgtcttttgggggcaacctcgggcgagcagtcttccaggccaaaaagaggcttcttgaacctcttggtctggttgaggaagcggctaagacggctcctggaaagaagaggcctgtagagcagtctcctcaggaaccggactcctccgcgggtattggcaaatcgggtgcacagcccgctaaaaagagactcaatttcggtcagactggcgacacagagtcagtcccagaccctcaaccaatcggagaacctcccgcagccccctcaggtgtgggatctcttacaatggcttcaggtggtggcgcaccagtggcagacaataacgaaggtgccgatggagtgggtagttcctcgggaaattggcattgcgattcccaatggctgggggacagagtcatcaccaccagcacccgaacctgggccctgcccacctacaacaatcacctctacaagcaaatctccaacagcacatctggaggatcttcaaatgacaacgcctacttcggctacagcaccccctgggggtattttgacttcaacagattccactgccacttctcaccacgtgactggcagcgactcatcaacaacaactggggattccggcctaagcgactcaacttcaagctcttcaacattcaggtcaaagaggttacggacaacaatggagtcaagaccatcgccaataaccttaccagcacggtccaggtcttcacggactcagactatcagctcccgtacgtgctcgggtcggctcacgagggctgcctcccgccgttcccagcggacgttttcatgattcctcagtacgggtatctgacgcttaatgatggaagccaggccgtgggtcgttcgtccttttactgcctggaatatttcccgtcgcaaatgctaagaacgggtaacaacttccagttcagctacgagtttgagaacgtacctttccatagcagctacgctcacagccaaagcctggaccgactaatgaatccactcatcgaccaatacttgtactatctctcaaagactattaacggttctggacagggccaacaaacgctaaaattcagtgtggccggacccagcaacatggctgtccagggaagaaactacatacctggacccagctaccgacaacaacgtgtctcaaccactgtgacttttaacaacaacagcgaatttgcttggcctggagcttcttcttgggctctcaatggacgtaatagcttgatgaatcctggacctgctatggccagccacaaagaaggagaggaccgtttctttcctttgtctggatctttaatttttggcaaacaaggaactggaagagacaacgtggatgcggacaaagtcatgataaccaacgaagaagaaattaaaactactaacccggtagcaacggagtcctatggacaagtggccacaaaccaccagagtgcccgggcacaggcgcagaccggctttgttcaaaaccaaggaatacttccgggtatggtttggcaggacagagatgtgtacctgcaaggacccatttgggccaaaattcctcacacggacggcaactttcacccttctccgctgatgggagggtttggaatgaagcacccgcctcctcagatcctcatcaaaaacacacctgtacctgcggatcctccaacggccttcaacaagggcaagctgaactctttcatcacccagtattctactggccaagtcagcgtggagatcgagtgggagctgcagaaggaaaacagcaagcgctggaacccggagatccagtacacttccaactattacaagtctaataatgttgaatttgctgttaatactgaaggtgtatatagtgaaccccgccccattggcaccagatacctgactcgtaatctg

SEQ ID NO: 902 - protein, 736 aa, synthetic construct
  REGION 1..736: note = Adeno Associated Virus Capsid Protein Variant
MAADGYLPDWLEDNLSEGIREWWALKPGAPQPKANQQHQDNARGLVLPGYKYLGPGNGLDKGEPVNAADAAALEHDKAYDQQLKAGDNPYLKYNHADAEFQERLKEDTSFGGNLGRAVFQAKKRLLEPLGLVEEAAKTAPGKKRPVEQSPQEPDSSAGIGKSGAQPAKKRLNFGQTGDTESVPDPQPIGEPPAAPSGVGSLTMASGGGAPVADNNEGADGVGSSSGNWHCDSQWLGDRVITTSTRTWALPTYNNHLYKQISNSTSGGSSNDNAYFGYSTPWGYFDFNRFHCHFSPRDWQRLINNNWGFRPKRLNFKLFNIQVKEVTDNNGVKTIANNLTSTVQVFTDSDYQLPYVLGSAHEGCLPPFPADVFMIPQYGYLTLNDGSQAVGRSSFYCLEYFPSQMLRTGNNFQFSYEFENVPFHSSYAHSQSLDRLMNPLIDQYLYYLSKTINGSGQGQQTLKFSVAGPSNMAVQGRNYIPGPSYRQQRVSTTVTFNNNSEFAWPGASSWALNGRNSLMNPGPAMASHKEGEDRFFPLSGSLIFGKQGTGRDNVDADKVMITNEEEIKTTNPVATESYGQVATNHQSARAQAQTGFVQNQGILPGMVWQDRDVYLQGPIWAKIPHTDGNFHPSPLMGGFGMKHPPPQILIKNTPVPADPPTAFNKGKLNSFITQYSTGQVSVEIEWELQKENSKRWNPEIQYTSNYYKSNNVEFAVNTEGVYSEPRPIGTRYLTRNL

SEQ ID NO: 903 - DNA, 2208 bp, synthetic construct
  misc_feature 1..2208: note = Adeno Associated Virus Capsid Protein Variant
  source 1..2208: mol_type = other DNA
atggctgccgatggttatcttccagattggctcgaggacaaccttagtgaaggaattcgcgagtggtgggctttgaaacctggagcccctcaacccaaggcaaatcaacaacatcaagacaacgctcgaggtcttgtgcttccgggttacaaataccttggacccggcaacggactcgacaagggggagccggtcaacgcagcagacgcggcggccctcgagcacgacaaggcctacgaccagcagctcaaggccggagacaacccgtacctcaagtacaaccacgccgacgccgagttccaggagcggctcaaagaagatacgtcttttgggggcaacctcgggcgagcagtcttccaggccaaaaagaggcttcttgaacctcttggtctggttgaggaagcggctaagacggctcctggaaagaagaggcctgtagagcagtctcctcaggaaccggactcctccgcgggtattggcaaatcgggtgcacagcccgctaaaaagagactcaatttcggtcagactggcgacacagagtcagtcccagaccctcaaccaatcggagaacctcccgcagccccctcaggtgtgggatctcttacaatggcttcaggtggtggcgcaccagtggcagacaataacgaaggtgccgatggagtgggtagttcctcgggaaattggcattgcgattcccaatggctgggggacagagtcatcaccaccagcacccgaacctgggccctgcccacctacaacaatcacctctacaagcaaatctccaacagcacatctggaggatcttcaaatgacaacgcctacttcggctacagcaccccctgggggtattttgacttcaacagattccactgccacttctcaccacgtgactggcagcgactcatcaacaacaactggggattccggcctaagcgactcaacttcaagctcttcaacattcaggtcaaagaggttacggacaacaatggagtcaagaccatcgccaataaccttaccagcacggtccaggtcttcacggactcagactatcagctcccgtacgtgctcgggtcggctcacgagggctgcctcccgccgttcccagcggacgttttcatgattcctcagtacgggtatctgacgcttaatgatggaagccaggccgtgggtcagtcgtccttttactgcctggaatatttcccgtcgcaaatgctaagaacgggtaacaacttccagttcagctacgagtttgagaacgtacctttccatagcagctacgctcacagccaaagcctggaccgactaatgaatccactcatcgaccaatacttgtactatctctcaaagactattaacggttctggacagggccaacaaacgctaaaattcagtgtggccggacccagcaacatggctgtccagggaagaaactacatacctggacccagctaccgacaacaacgtgtctcaaccactgtgacttttaacaacaacagcgaatttgcttggcctggagcttcttcttgggctctcaatggacgtaatagcttgatgaatcctggacctgctatggccagccacaaagaaggagaggaccgtttctttcctttgtctggatctttaatttttggcaaacaaggaactggaagagacaacgtggatgcggacaaagtcatgataaccaacgaagaagaaattaaaactactaacccggtagcaacggagtcctatggacaagtggccacaaaccaccagagtgcccgggcacaggcgcagaccggctgggttcaaaaccaaggaatacttccgggtatggtttggcaggacagagatgtgtacctgcaaggacccatttgggccaaaattcctcacacggacggcaactttcacccttctccgctgatgggagggtttggaatgaagcacccgcctcctcagatcctcatcaaaaacacacctgtacctgcggatcctccaacggccttcaacaagggcaagctgaactctttcatcacccagtattctactggccaagtcagcgtggagatcgagtgggagctgcagaaggaaaacagcaagcgctggaacccggagatccagtacacttccaactattacaagtctaataatgttgaatttgctgttaatactgaaggtgtatatagtgaaccccgccccattggcaccagatacctgactcgtaatctg

SEQ ID NO: 904 - protein, 736 aa, synthetic construct
  REGION 1..736: note = Adeno Associated Virus Capsid Protein Variant
MAADGYLPDWLEDNLSEGIREWWALKPGAPQPKANQQHQDNARGLVLPGYKYLGPGNGLDKGEPVNAADAAALEHDKAYDQQLKAGDNPYLKYNHADAEFQERLKEDTSFGGNLGRAVFQAKKRLLEPLGLVEEAAKTAPGKKRPVEQSPQEPDSSAGIGKSGAQPAKKRLNFGQTGDTESVPDPQPIGEPPAAPSGVGSLTMASGGGAPVADNNEGADGVGSSSGNWHCDSQWLGDRVITTSTRTWALPTYNNHLYKQISNSTSGGSSNDNAYFGYSTPWGYFDFNRFHCHFSPRDWQRLINNNWGFRPKRLNFKLFNIQVKEVTDNNGVKTIANNLTSTVQVFTDSDYQLPYVLGSAHEGCLPPFPADVFMIPQYGYLTLNDGSQAVGQSSFYCLEYFPSQMLRTGNNFQFSYEFENVPFHSSYAHSQSLDRLMNPLIDQYLYYLSKTINGSGQGQQTLKFSVAGPSNMAVQGRNYIPGPSYRQQRVSTTVTFNNNSEFAWPGASSWALNGRNSLMNPGPAMASHKEGEDRFFPLSGSLIFGKQGTGRDNVDADKVMITNEEEIKTTNPVATESYGQVATNHQSARAQAQTGWVQNQGILPGMVWQDRDVYLQGPIWAKIPHTDGNFHPSPLMGGFGMKHPPPQILIKNTPVPADPPTAFNKGKLNSFITQYSTGQVSVEIEWELQKENSKRWNPEIQYTSNYYKSNNVEFAVNTEGVYSEPRPIGTRYLTRNL

SEQ ID NO: 905 - DNA, 2208 bp, synthetic construct
  misc_feature 1..2208: note = Adeno Associated Virus Capsid Protein Variant
  source 1..2208: mol_type = other DNA
atggctgccgatggttatcttccagattggctcgaggacaaccttagtgaaggaattcgcgagtggtgggctttgaaacctggagcccctcaacccaaggcaaatcaacaacatcaagacaacgctcgaggtcttgtgcttccgggttacaaataccttggacccggcaacggactcgacaagggggagccggtcaacgcagcagacgcggcggccctcgagcacgacaaggcctacgaccagcagctcaaggccggagacaacccgtacctcaagtacaaccacgccgacgccgagttccaggagcggctcaaagaagatacgtcttttgggggcaacctcgggcgagcagtcttccaggccaaaaagaggcttcttgaacctcttggtctggttgaggaagcggctaagacggctcctggaaagaagaggcctgtagagcagtctcctcaggaaccggactcctccgcgggtattggcaaatcgggtgcacagcccgctaaaaagagactcaatttcggtcagactggcgacacagagtcagtcccagaccctcaaccaatcggagaacctcccgcagccccctcaggtgtgggatctcttacaatggcttcaggtggtggcgcaccagtggcagacaataacgaaggtgccgatggagtgggtagttcctcgggaaattggcattgcgattcccaatggctgggggacagagtcatcaccaccagcacccgaacctgggccctgcccacctacaacaatcacctctacaagcaaatctccaacagcacatctggaggatcttcaaatgacaacgcctacttcggctacagcaccccctgggggtattttgacttcaacagattccactgccacttctcaccacgtgactggcagcgactcatcaacaacaactggggattccggcctaagcgactcaacttcaagctcttcaacattcaggtcaaagaggttacggacaacaatggagtcaagaccatcgccaataaccttaccagcacggtccaggtcttcacggactcagactatcagctcccgtacgtgctcgggtcggctcacgagggctgcctcccgccgttcccagcggacgttttcatgattcctcagtacgggtatctgacgcttaatgatggaagccaggccgtgggtcagtcgtccttttactgcctggaatatttcccgtcgcaaatgctaagaacgggtaacaacttccagttcagctacgagtttgagaacgtacctttccatagcagctacgctcacagccaaagcctggaccgactaatgaatccactcatcgaccaatacttgtactatctctcaaagactattaacggttctggacagggccaacaaacgctaaaattcagtgtggccggacccagcaacatggctgtccagggaagaaactacatacctggacccagctaccgacaacaacgtgtctcaaccactgtgacttttaacaacaacagcgaatttgcttggcctggagcttcttcttgggctctcaatggacgtaatagcttgatgaatcctggacctgctatggccagccacaaagaaggagaggaccgtttctttcctttgtctggatctttaatttttggcaaacaaggaactggaagagacaacgtggatgcggacaaagtcatgataaccaacgaagaagaaattaaaactactaacccggtagcaacggagtcctatggacaagtggccacaaaccaccagagtgcccgggcacaggcgcagaccggctgggttcaaaaccaaggaatacttccgggtatggtttggcaggacagagatgtgtacctgcaaggacccatttgggccaaaattcctcacacggacggcaactttcacccttctccgctgatgggagggtttggaatgaagcacccgcctcctcagatcctcatcaaaaacacacctgtacctgcggatcctccaacgaaattcaacaagggcaagctgaactctttcatcacccagtattctactggccaagtcagcgtggagatcgagtgggagctgcagaaggaaaacagcaagcgctggaacccggagatccagtacacttccaactattacaagtctaataatgttgaatttgctgttaatactgaaggtgtatatagtgaaccccgccccattggcaccagatacctgactcgtaatctg

SEQ ID NO: 906 - protein, 736 aa, synthetic construct
  REGION 1..736: note = Adeno Associated Virus Capsid Protein Variant
MAADGYLPDWLEDNLSEGIREWWALKPGAPQPKANQQHQDNARGLVLPGYKYLGPGNGLDKGEPVNAADAAALEHDKAYDQQLKAGDNPYLKYNHADAEFQERLKEDTSFGGNLGRAVFQAKKRLLEPLGLVEEAAKTAPGKKRPVEQSPQEPDSSAGIGKSGAQPAKKRLNFGQTGDTESVPDPQPIGEPPAAPSGVGSLTMASGGGAPVADNNEGADGVGSSSGNWHCDSQWLGDRVITTSTRTWALPTYNNHLYKQISNSTSGGSSNDNAYFGYSTPWGYFDFNRFHCHFSPRDWQRLINNNWGFRPKRLNFKLFNIQVKEVTDNNGVKTIANNLTSTVQVFTDSDYQLPYVLGSAHEGCLPPFPADVFMIPQYGYLTLNDGSQAVGQSSFYCLEYFPSQMLRTGNNFQFSYEFENVPFHSSYAHSQSLDRLMNPLIDQYLYYLSKTINGSGQGQQTLKFSVAGPSNMAVQGRNYIPGPSYRQQRVSTTVTFNNNSEFAWPGASSWALNGRNSLMNPGPAMASHKEGEDRFFPLSGSLIFGKQGTGRDNVDADKVMITNEEEIKTTNPVATESYGQVATNHQSARAQAQTGWVQNQGILPGMVWQDRDVYLQGPIWAKIPHTDGNFHPSPLMGGFGMKHPPPQILIKNTPVPADPPTKFNKGKLNSFITQYSTGQVSVEIEWELQKENSKRWNPEIQYTSNYYKSNNVEFAVNTEGVYSEPRPIGTRYLTRNL

SEQ ID NO: 907 - DNA, 2208 bp, synthetic construct
  misc_feature 1..2208: note = Adeno Associated Virus Capsid Protein Variant
  source 1..2208: mol_type = other DNA
atggctgccgatggttatcttccagattggctcgaggacaaccttagtgaaggaattcgcgagtggtgggctttgaaacctggagcccctcaacccaaggcaaatcaacaacatcaagacaacgctcgaggtcttgtgcttccgggttacaaataccttggacccggcaacggactcgacaagggggagccggtcaacgcagcagacgcggcggccctcgagcacgacaaggcctacgaccagcagctcaaggccggagacaacccgtacctcaagtacaaccacgccgacgccgagttccaggagcggctcaaagaagatacgtcttttgggggcaacctcgggcgagcagtcttccaggccaaaaagaggcttcttgaacctcttggtctggttgaggaagcggctaagacggctcctggaaagaagaggcctgtagagcagtctcctcaggaaccggactcctccgcgggtattggcaaatcgggtgcacagcccgctaaaaagagactcaatttcggtcagactggcgacacagagtcagtcccagaccctcaaccaatcggagaacctcccgcagccccctcaggtgtgggacctcttacaatggcttcaggtggtggcgcaccagtggcagacaataacgaaggtgccgatggagtgggtagttcctcgggaaattggcattgcgattcccaatggctgggggacagagtcatcaccaccagcacccgaacctgggccctgcccacctacaacaatcacctctacaagcaaatctccaacagcacatctggaggatcttcaaatgacaacgcctacttcggctacagcaccccctgggggtattttgacttcaacagattccactgccacttctcaccacgtgactggcagcgactcatcaacaacaactggggattccggcctaagcgactcaacttcaagctcttcaacattcaggtcaaagaggttacggacaacaatggagtcaagaccatcgccaataaccttaccagcacggtccaggtcttcacggactcagactatcagctcccgtacgtgctcgggtcggctcacgagggctgcctcccgccgttcccagcggacgttttcatgattcctcagtacgggtatctgacgcttaatgatggaagccaggccgtgggtcgttcgtccttttactgcctggaatatttcccgtcgcaaatgctaagaacgggtaacaacttccagttcagctacgagtttgagaacgtacctttccatagcagctacgctcacagccaaagcctggaccgactaatgaatccactcatcgaccaatacttgtactatctctcaaagactattaacggttctggacagggccaacaaacgctaaaattcagtgtggccggacccagcaacatggctgtccagggaagaaactacatacctggacccagctaccgacaacaacgtgtctcaaccactgtgacttttaacaacaacagcgaatttgcttggcctggagcttcttcttgggctctcaatggacgtaatagcttgatgaatcctggacctgctatggccagccacaaagaaggagaggaccgtttctttcctttgtctggatctttaatttttggcaaacaaggaactggaagagacaacgtggatgcggacaaagtcatgataaccaacgaagaagaaattaaaactactaacccggtagcaacggagtcctatggacaagtggccacaaaccaccagagtgcccgggcacaggcgcagaccggctgggttcaaaaccaaggaatacttccgggtatggtttggcaggacagagatgtgtacctgcaaggacccatttgggccaaaattcctcacacggacggcaactttcacccttctccgctgatgggagggtttggaatgaagcacccgcctcctcagatcctcatcaaaaacacacctgtacctgcggatcctccaacggccttcaacaagggcaagctgaactctttcatcacccagtattctactggccaagtcagcgtggagatcgagtgggagctgcagaaggaaaacagcaagcgctggaacccggagatccagtacacttccaactattacaagtctaataatgttgaatttgctgttaatactgaaggtgtatatagtgaaccccgccccattggcaccagatacctgactcgtaatctg

SEQ ID NO: 908 - protein, 736 aa, synthetic construct
  REGION 1..736: note = Adeno Associated Virus Capsid Protein Variant
MAADGYLPDWLEDNLSEGIREWWALKPGAPQPKANQQHQDNARGLVLPGYKYLGPGNGLDKGEPVNAADAAALEHDKAYDQQLKAGDNPYLKYNHADAEFQERLKEDTSFGGNLGRAVFQAKKRLLEPLGLVEEAAKTAPGKKRPVEQSPQEPDSSAGIGKSGAQPAKKRLNFGQTGDTESVPDPQPIGEPPAAPSGVGPLTMASGGGAPVADNNEGADGVGSSSGNWHCDSQWLGDRVITTSTRTWALPTYNNHLYKQISNSTSGGSSNDNAYFGYSTPWGYFDFNRFHCHFSPRDWQRLINNNWGFRPKRLNFKLFNIQVKEVTDNNGVKTIANNLTSTVQVFTDSDYQLPYVLGSAHEGCLPPFPADVFMIPQYGYLTLNDGSQAVGRSSFYCLEYFPSQMLRTGNNFQFSYEFENVPFHSSYAHSQSLDRLMNPLIDQYLYYLSKTINGSGQGQQTLKFSVAGPSNMAVQGRNYIPGPSYRQQRVSTTVTFNNNSEFAWPGASSWALNGRNSLMNPGPAMASHKEGEDRFFPLSGSLIFGKQGTGRDNVDADKVMITNEEEIKTTNPVATESYGQVATNHQSARAQAQTGWVQNQGILPGMVWQDRDVYLQGPIWAKIPHTDGNFHPSPLMGGFGMKHPPPQILIKNTPVPADPPTAFNKGKLNSFITQYSTGQVSVEIEWELQKENSKRWNPEIQYTSNYYKSNNVEFAVNTEGVYSEPRPIGTRYLTRNL

SEQ ID NO: 909 - DNA, 2208 bp, synthetic construct
  misc_feature 1..2208: note = Adeno Associated Virus Capsid Protein Variant
  source 1..2208: mol_type = other DNA
atggctgccgatggttatcttccagattggctcgaggacaaccttagtgaaggaattcgcgagtggtgggctttgaaacctggagcccctcaacccaaggcaaatcaacaacatcaagacaacgctcgaggtcttgtgcttccgggttacaaataccttggacccggcaacggactcgacaagggggagccggtcaacgcagcagacgcggcggccctcgagcacgacaaggcctacgaccagcagctcaaggccggagacaacccgtacctcaagtacaaccacgccgacgccgagttccaggagcggctcaaagaagatacgtcttttgggggcaacctcgggcgagcagtcttccaggccaaaaagaggcttcttgaacctcttggtctggttgaggaagcggctaagacggctcctggaaagaagaggcctgtagagcagtctcctcaggaaccggactcctccgcgggtattggcaaatcgggtgcagtgcccgctaaaaagagactcaatttcggtcagactggcgacacagagtcagtcccagaccctcaaccaatcggagaacctcccgcagccccctcaggtgtgggatctcttacaatggcttcaggtggtggcgcaccagtggcagacaataacgaaggtgccgatggagtgggtagttcctcgggaaattggcattgcgattcccaatggctgggggacagagtcatcaccaccagcacccgaacctgggccctgcccacctacaacaatcacctctacaagcaaatctccaacagcacatctggaggatcttcaaatgacaacgcctacttcggctacagcaccccctgggggtattttgacttcaacagattccactgccacttctcaccacgtgactggcagcgactcatcaacaacaactggggattccggcctaagcgactcaacttcaagctcttcaacattcaggtcaaagaggttacggacaacaatggagtcaagaccatcgccaataaccttaccagcacggtccaggtcttcacggactcagactatcagctcccgtacgtgctcgggtcggctcacgagggctgcctcccgccgttcccagcggacgttttcatgattcctcagtacgggtatctgacgcttaatgatggaagccaggccgtgggtcagtcgtccttttactgcctggaatatttcccgtcgcaaatgctaagaacgggtaacaacttccagttcagctacgagtttgagaacgtacctttccatagcagctacgctcacagccaaagcctggaccgactaatgaatccactcatcgaccaatacttgtactatctctcaaagactattaacggtcagggacagggccaacaaacgctaaaattcagtgtggccggacccagcaacattgctgtccagggaagaaactacatacctggacccagctaccgacaacaacgtgtctcaaccactgtgacttttaacaacaacagcgaatttgcttggcctggagcttcttcttgggctctcaatggacgtaatagcttgatgaatcctggacctgctatggccagccacaaagaaggagaggaccgtttctttcctttgtctggatctttaatttttggcaaacaaggaactggaagagacaacgtggatgcggacaaagtcatgataaccaacgaagaagaaattaaaactactaacccggtagcaacggagtcctatggacaagtggccacaaaccaccagagtgcccgggcacaggcgcagaccggctgggttcaaaaccaaggaatacttccgggtatggtttggcaggacagagatgtgtacctgcaaggacccatttgggccaaaattcctcacacggacggcaactttcacccttctccgctgatgggagggtttggaatgaagcacccgcctcctcagatcctcatcaaaaacacacctgtacctgcggatcctccaacggccttcaacaagggcaagctgaactctttcatcacccagtattctactggccaagtcagcgtggagatcgagtgggagctgcagaaggaaaacagcaagcgctggaacccggagatccagtacacttccaactattacaagtctaataatgttgaatttgctgttaatactgaaggtgtatatagtgaaccccgccccattggcaccagatacctgactcgtaatctg

SEQ ID NO: 910 - protein, 736 aa, synthetic construct
  REGION 1..736: note = Adeno Associated Virus Capsid Protein Variant
MAADGYLPDWLEDNLSEGIREWWALKPGAPQPKANQQHQDNARGLVLPGYKYLGPGNGLDKGEPVNAADAAALEHDKAYDQQLKAGDNPYLKYNHADAEFQERLKEDTSFGGNLGRAVFQAKKRLLEPLGLVEEAAKTAPGKKRPVEQSPQEPDSSAGIGKSGAVPAKKRLNFGQTGDTESVPDPQPIGEPPAAPSGVGSLTMASGGGAPVADNNEGADGVGSSSGNWHCDSQWLGDRVITTSTRTWALPTYNNHLYKQISNSTSGGSSNDNAYFGYSTPWGYFDFNRFHCHFSPRDWQRLINNNWGFRPKRLNFKLFNIQVKEVTDNNGVKTIANNLTSTVQVFTDSDYQLPYVLGSAHEGCLPPFPADVFMIPQYGYLTLNDGSQAVGQSSFYCLEYFPSQMLRTGNNFQFSYEFENVPFHSSYAHSQSLDRLMNPLIDQYLYYLSKTINGQGQGQQTLKFSVAGPSNIAVQGRNYIPGPSYRQQRVSTTVTFNNNSEFAWPGASSWALNGRNSLMNPGPAMASHKEGEDRFFPLSGSLIFGKQGTGRDNVDADKVMITNEEEIKTTNPVATESYGQVATNHQSARAQAQTGWVQNQGILPGMVWQDRDVYLQGPIWAKIPHTDGNFHPSPLMGGFGMKHPPPQILIKNTPVPADPPTAFNKGKLNSFITQYSTGQVSVEIEWELQKENSKRWNPEIQYTSNYYKSNNVEFAVNTEGVYSEPRPIGTRYLTRNL

SEQ ID NO: 911 - DNA, 2208 bp, synthetic construct
  misc_feature 1..2208: note = Adeno Associated Virus Capsid Protein Variant
  source 1..2208: mol_type = other DNA
atggctgccgatggttatcttccagattggctcgaggacaaccttagtgaaggaattcgcgagtggtgggctttgaaacctggagcccctcaacccaaggcaaatcaacaacatcaagacaacgctcgaggtcttgtgcttccgggttacaaataccttggacccggcaacggactcgacaagggggagccggtcaacgcagcagacgcggcggccctcgagcacgacaaggcctacgaccagcagctcaaggccggagacaacccgtacctcaagtacaaccacgccgacgccgagttccaggagcggctcaaagaagatacgtcttttgggggcaacctcgggcgagcagtcttccaggccaaaaagaggcttcttgaacctcttggtctggttgaggaagcggctaagacggctcctggaaagaagaggcctgtagagcagtctcctcaggaaccggactcctcctggggtattggcaaatcgggtgcagtgcccgctaaaaagagactcaatttcggtcagactggcgacacagagtcagtcccagaccctcaaccaatcggagaacctcccgcagccccctcaggtgtgggatctcttacaatggcttcaggtggtggcgcaccagtggcagacaataacgaaggtgccgatggagtgggtagttcctcgggaaattggcattgcgattcccaatggctgggggacagagtcatcaccaccagcacccgaacctgggccctgcccacctacaacaatcacctctacaagcaaatctccaacagcacatctggaggatcttcaaatgacaacgcctacttcggctacagcaccccctgggggtattttgacttcaacagattccactgccacttctcaccacgtgactggcagcgactcatcaacaacaactggggattccggcctaagcgactcaacttcaagctcttcaacattcaggtcaaagaggttacggacaacaatggagtcaagaccatcgccaataaccttaccagcacggtccaggtcttcacggactcagactatcagctcccgtacgtgctcgggtcggctcacgagggctgcctcccgccgttcccagcggacgttttcatgattcctcagtacgggtatctgacgcttaatgatggaagccaggccgtgggtcagtcgtccttttactgcctggaatatttcccgtcgcaaatgctaagaacgggtaacaacttccagttcagctacgagtttgagaacgtacctttccatagcagctacgctcacagccaaagcctggaccgactaatgaatccactcatcgaccaatacttgtactatctctcaaagactattaacggttctggacagggccaacaaacgctaaaattcagtgtggccggacccagcaacatggctgtccagggaagaaactacatacctggacccagctaccgacaacaacgtgtctcaaccactgtgacttttaacaacaacagcgaatttgcttggcctggagcttcttcttgggctctcaatggacgtaatagcttgatgaatcctggacctgctatggccagccacaaagaaggagaggaccgtttctttcctttgtctggatctttaatttttggcaaacaaggaactggaagagacaacgtggatgcggacaaagtcatgataaccaacgaagaagaaattaaaactactaacccggtagcaacggagtcctatggacaagtggccacaaaccaccagagtgcccgggcacaggcgcagaccggctgggttcaaaaccaaggaatacttccgggtatggtttggcaggacagagatgtgtacctgcaaggacccatttgggccaaaattcctcacacggacggcaactttcacccttctccgctgatgggagggtttggaatgaagcacccgcctcctcagatcctcatcaaaaacacacctgtacctgcggatcctccaacggccttcaacaagggcaagctgaactctttcatcacccagtattctactggccaagtcagcgtggagatcgagtgggagctgcagaaggaaaacagcaagcgctggaacccggagatccagtacacttccaactattacaagtctaataatgttgaatttgctgttaatactgaaggtgtatatagtgaaccccgccccattggcaccagatacctgactcgtaatctg

SEQ ID NO: 912 - protein, 736 aa, synthetic construct
  REGION 1..736: note = Adeno Associated Virus Capsid Protein Variant
MAADGYLPDWLEDNLSEGIREWWALKPGAPQPKANQQHQDNARGLVLPGYKYLGPGNGLDKGEPVNAADAAALEHDKAYDQQLKAGDNPYLKYNHADAEFQERLKEDTSFGGNLGRAVFQAKKRLLEPLGLVEEAAKTAPGKKRPVEQSPQEPDSSWGIGKSGAVPAKKRLNFGQTGDTESVPDPQPIGEPPAAPSGVGSLTMASGGGAPVADNNEGADGVGSSSGNWHCDSQWLGDRVITTSTRTWALPTYNNHLYKQISNSTSGGSSNDNAYFGYSTPWGYFDFNRFHCHFSPRDWQRLINNNWGFRPKRLNFKLFNIQVKEVTDNNGVKTIANNLTSTVQVFTDSDYQLPYVLGSAHEGCLPPFPADVFMIPQYGYLTLNDGSQAVGQSSFYCLEYFPSQMLRTGNNFQFSYEFENVPFHSSYAHSQSLDRLMNPLIDQYLYYLSKTINGSGQGQQTLKFSVAGPSNMAVQGRNYIPGPSYRQQRVSTTVTFNNNSEFAWPGASSWALNGRNSLMNPGPAMASHKEGEDRFFPLSGSLIFGKQGTGRDNVDADKVMITNEEEIKTTNPVATESYGQVATNHQSARAQAQTGWVQNQGILPGMVWQDRDVYLQGPIWAKIPHTDGNFHPSPLMGGFGMKHPPPQILIKNTPVPADPPTAFNKGKLNSFITQYSTGQVSVEIEWELQKENSKRWNPEIQYTSNYYKSNNVEFAVNTEGVYSEPRPIGTRYLTRNL

SEQ ID NO: 913 - DNA, 2208 bp, synthetic construct
  misc_feature 1..2208: note = Adeno Associated Virus Capsid Protein Variant
  source 1..2208: mol_type = other DNA
atggctgccgatggttatcttccagattggctcgaggacaaccttagtgaaggaattcgcgagtggtgggctttgaaacctggagcccctcaacccaaggcaaatcaacaacatcaagacaacgctcgaggtcttgtgcttccgggttacaaataccttggacccggcaacggactcgacaagggggagccggtcaacgcagcagacgcggcggccctcgagcacgacaaggcctacgaccagcagctcaaggccggagacaacccgtacctcaagtacaaccacgccgacgccgagttccaggagcggctcaaagaagatacgtcttttgggggcaacctcgggcgagcagtcttccaggccaaaaagaggcttcttgaacctcttggtctggttgaggaagcggctaagacggctcctggaaagaagaggcctgtagagcagtctcctcaggaaccggactcctccgcgggtattggcaaatcgggtgcagtgcccgctaaaaagagactcaatttcggtcagactggcgacacagagtcagtcccagaccctcaaccaatcggagaacctcccgcagccccctcaggtgtgggatctcttacaatggcttcaggtggtggcgcaccagtggcagacaataacgaaggtgccgatggagtgggtagttcctcgggaaattggcattgcgattcccaatggctgggggacagagtcatcaccaccagcacccgaacctgggccctgcccacctacaacaatcacctctacaagcaaatctccaacagcacatctggaggatcttcaaatgacaacgcctacttcggctacagcaccccctgggggtattttgacttcaacagattccactgccacttctcaccacgtgactggcagcgactcatcaacaacaactggggattccggcctaagcgactcaacttcaagctcttcaacattcaggtcaaagaggttacggacaacaatggagtcaagaccatcgccaataaccttaccagcacggtccaggtcttcacggactcagactatcagctcccgtacgtgctcgggtcggctcacgagggctgcctcccgccgttcccagcggacgttttcatgattcctcagtacgggtatctgacgcttaatgatggaagccaggccgtgggtcagtcgtccttttactgcctggaatatttcccgtcgcaaatgctaagaacgggtaacaacttccagttcagctacgagtttgagaacgtacctttccatagcagctacgctcacagccaaagcctggaccgactaatgaatccactcatcgaccaatacttgtactatctctcaaagactattaacggttctggacagggccaacaaacgctaaaattcagtgtggccggacccagcaacatggctgtccagggaagaaactacatacctggacccagctaccgacaacaacgtgtctcaaccactgtgacttttaacaacaacagcgaatttgcttggcctggagcttcttcttgggctctcaatggacgtaatagcttgatgaatcctggacctgctatggccagccacaaagaaggagaggaccgtttctttcctttgtctggatctttaatttttggcaaacaaggaactggaagagacaacgtggatgcggacaaagtcatgataaccaacgaagaagaaattaaaactactaacccggtagcaacggagtcctatggacaagtggccacaaaccaccagagtgcccgggcacaggcgcagaccggctgggttcaaaaccaaggaatacttccgggtatggtttggcaggacagagatgtgtacctgcaaggacccatttgggccaaaattcctcacacggacggcaactttcacccttctccgctgatgggagggtttggaatgaagcacccgcctcctcagatcctcatcaaaaacacacctgtacctgcggatcctccaacggccttcaacaagggcaagctgaactctttcatcacccagtattctactggccaagtcagcgtggagatcgagtgggagctgcagaaggaaaacagcaagcgctggaacccggagatccagtacacttccaactattacaagtctaataatgttgaatttgctgttaatactgaaggtgtatatagtgaaccccgccccattggcaccagatacctgactcgtaatctg

SEQ ID NO: 914 - protein, 736 aa, synthetic construct
  REGION 1..736: note = Adeno Associated Virus Capsid Protein Variant
MAADGYLPDWLEDNLSEGIREWWALKPGAPQPKANQQHQDNARGLVLPGYKYLGPGNGLDKGEPVNAADAAALEHDKAYDQQLKAGDNPYLKYNHADAEFQERLKEDTSFGGNLGRAVFQAKKRLLEPLGLVEEAAKTAPGKKRPVEQSPQEPDSSAGIGKSGAVPAKKRLNFGQTGDTESVPDPQPIGEPPAAPSGVGSLTMASGGGAPVADNNEGADGVGSSSGNWHCDSQWLGDRVITTSTRTWALPTYNNHLYKQISNSTSGGSSNDNAYFGYSTPWGYFDFNRFHCHFSPRDWQRLINNNWGFRPKRLNFKLFNIQVKEVTDNNGVKTIANNLTSTVQVFTDSDYQLPYVLGSAHEGCLPPFPADVFMIPQYGYLTLNDGSQAVGQSSFYCLEYFPSQMLRTGNNFQFSYEFENVPFHSSYAHSQSLDRLMNPLIDQYLYYLSKTINGSGQGQQTLKFSVAGPSNMAVQGRNYIPGPSYRQQRVSTTVTFNNNSEFAWPGASSWALNGRNSLMNPGPAMASHKEGEDRFFPLSGSLIFGKQGTGRDNVDADKVMITNEEEIKTTNPVATESYGQVATNHQSARAQAQTGWVQNQGILPGMVWQDRDVYLQGPIWAKIPHTDGNFHPSPLMGGFGMKHPPPQILIKNTPVPADPPTAFNKGKLNSFITQYSTGQVSVEIEWELQKENSKRWNPEIQYTSNYYKSNNVEFAVNTEGVYSEPRPIGTRYLTRNL

SEQ ID NO: 915 - DNA, 2208 bp, synthetic construct
  misc_feature 1..2208: note = Adeno Associated Virus Capsid Protein Variant
  source 1..2208: mol_type = other DNA
atggctgccgatggttatcttccagattggctcgaggacaaccttagtgaaggaattcgcgagtggtgggctttgaaacctggagcccctcaacccaaggcaaatcaacaacatcaagacaacgctcgaggtcttgtgcttccgggttacaaataccttggacccggcaacggactcgacaagggggagccggtcaacgcagcagacgcggcggccctcgagcacgacaaggcctacgaccagcagctcaaggccggagacaacccgtacctcaagtacaaccacgccgacgccgagttccaggagcggctcaaagaagatacgtcttttgggggcaacctcgggcgagcagtcttccaggccaaaaagaggcttcttgaacctcttggtctggttgaggaagcggctaagacggctcctggaaagaagaggcctgtagagcagtctcctcaggaaccggactcctcctggggtattggcaaatcgggtgcacagcccgctaaaaagagactcaatttcggtcagactggcgacacagagtcagtcccagaccctcaaccaatcggagaacctcccgcagccccctcaggtgtgggatctcttacaatggcttcaggtggtggcgcaccagtggcagacaataacgaaggtgccgatggagtgggtagttcctcgggaaattggcattgcgattcccaatggctgggggacagagtcatcaccaccagcacccgaacctgggccctgcccacctacaacaatcacctctacaagcaaatctccaacagcacatctggaggatcttcaaatgacaacgcctacttcggctacagcaccccctgggggtattttgacttcaacagattccactgccacttctcaccacgtgactggcagcgactcatcaacaacaactggggattccggcctaagcgactcaacttcaagctcttcaacattcaggtcaaagaggttacggacaacaatggagtcaagaccatcgccaataaccttaccagcacggtccaggtcttcacggactcagactatcagctcccgtacgtgctcgggtcggctcacgagggctgcctcccgccgttcccagcggacgttttcatgattcctcagtacgggtatctgacgcttaatgatggaagccaggccgtgggtcagtcgtccttttactgcctggaatatttcccgtcgcaaatgctaagaacgggtaacaacttccagttcagctacgagtttgagaacgtaactttccatagcagctacgctcacagccaaagcctggaccgactaatgaatccactcatcgaccaatacttgtactatctctcaaagactattaacggttctggacagggccaacaaacgctaaaattcagtgtggccggacccagcaacatggctgtccagggaagaaactacatacctggacccagctaccgacaacaacgtgtctcaaccactgtgacttttaacaacaacagcgaatttgcttggcctggagcttcttcttgggctctcaatggacgtaatagcttgatgaatcctggacctgctatggccagccacaaagaaggagaggaccgtttctttcctttgtctggatctttaatttttggcaaacaaggaactggaagagacaacgtggatgcggacaaagtcatgataaccaacgaagaagaaattaaaactactaacccggtagcaacggagtcctatggacaagtggccacaaaccaccagagtgcccgggcacaggcgcagaccggctgggttcaaaaccaaggaatacttccgggtatggtttggcaggacagagatgtgtacctgcaaggacccatttgggccaaaattcctcacacggacggcaactttcacccttctccgctgatgggagggtttggaatgaagcacccgcctcctcagatcctcatcaaaaacacacctgtacctgcggatcctccaacggccttcaacaagggcaagctgaactctttcatcacccagtattctactggccaagtcagcgtggagatcgagtgggagctgcagaaggaaaacagcaagcgctggaacccggagatccagtacacttccaactattacaagtctaataatgttgaatttgctgttaatactgaaggtgtatatagtgaaccccgccccattggcaccagatacctgactcgtaatctg

SEQ ID NO: 916 - protein, 736 aa, synthetic construct
  REGION 1..736: note = Adeno Associated Virus Capsid Protein Variant
MAADGYLPDWLEDNLSEGIREWWALKPGAPQPKANQQHQDNARGLVLPGYKYLGPGNGLDKGEPVNAADAAALEHDKAYDQQLKAGDNPYLKYNHADAEFQERLKEDTSFGGNLGRAVFQAKKRLLEPLGLVEEAAKTAPGKKRPVEQSPQEPDSSWGIGKSGAQPAKKRLNFGQTGDTESVPDPQPIGEPPAAPSGVGSLTMASGGGAPVADNNEGADGVGSSSGNWHCDSQWLGDRVITTSTRTWALPTYNNHLYKQISNSTSGGSSNDNAYFGYSTPWGYFDFNRFHCHFSPRDWQRLINNNWGFRPKRLNFKLFNIQVKEVTDNNGVKTIANNLTSTVQVFTDSDYQLPYVLGSAHEGCLPPFPADVFMIPQYGYLTLNDGSQAVGQSSFYCLEYFPSQMLRTGNNFQFSYEFENVTFHSSYAHSQSLDRLMNPLIDQYLYYLSKTINGSGQGQQTLKFSVAGPSNMAVQGRNYIPGPSYRQQRVSTTVTFNNNSEFAWPGASSWALNGRNSLMNPGPAMASHKEGEDRFFPLSGSLIFGKQGTGRDNVDADKVMITNEEEIKTTNPVATESYGQVATNHQSARAQAQTGWVQNQGILPGMVWQDRDVYLQGPIWAKIPHTDGNFHPSPLMGGFGMKHPPPQILIKNTPVPADPPTAFNKGKLNSFITQYSTGQVSVEIEWELQKENSKRWNPEIQYTSNYYKSNNVEFAVNTEGVYSEPRPIGTRYLTRNL

SEQ ID NO: 917 - DNA, 2208 bp, synthetic construct
  misc_feature 1..2208: note = Adeno Associated Virus Capsid Protein Variant
  source 1..2208: mol_type = other DNA
atggctgccgatggttatcttccagattggctcgaggacaaccttagtgaaggaattcgcgagtggtgggctttgaaacctggagcccctcaacccaaggcaaatcaacaacatcaagacaacgctcgaggtcttgtgcttccgggttacaaataccttggacccggcaacggactcgacaagggggagccggtcaacgcagcagacgcggcggccctcgagcacgacaaggcctacgacgagcagctcaaggccggagacaacccgtacctcaagtacaaccacgccgacgccgagttccaggagcggctcaaagaagatacgtcttttgggggcaacctcgggcgagcagtcttccaggccaaaaagaggcttcttgaacctcttggtctggttgaggaagcggctaagacggctcctggaaagaagaggcctgtagagcagtctcctcaggaaccggactcctccgcgggtattggcaaatcgggtgcacagcccgctaaaaagagactcaatttcggtcagactggcgacacagagtcagtcccagaccctcaaccaatcggagaacctcccgcagccccctcaggtgtgggatctcttacaatggcttcaggtggtggcgcaccagtggcagacaataacgaaggtgccgatggagtgggtagttcctcgggaaattggcattgcgattcccaatggctgggggacagagtcatcaccaccagcacccgaacctgggccctgcccacctacaacaatcacctctacaagcaaatctccaacagcacatctggaggatcttcaaatgacaacgcctacttcggctacagcaccccctgggggtattttgacttcaacagattccactgccacttctcaccacgtgactggcagcgactcatcaacaacaactggggattccggcctaagcgactcaacttcaagctcttcaacattcaggtcaaagaggttacggacaacaatggagtcaagaccatcgccaataaccttaccagcacggtccaggtcttcacggactcagactatcagctcccgtacgtgctcgggtcggctcacgagggctgcctcccgccgttcccagcggacgttttcatgattcctcagtacgggtatctgacgcttaatgatggaagccaggccgtgggtcgttcgtccttttactgcctggaatatttcccgtcgcaaatgctaagaacgggtaacaacttccagttcagctacgagtttgagaacgtacctttccatagcagctacgctcacagccaaagcctggaccgactaatgaatccactcatcgaccaatacttgtactatctctcaaagactattaacggttctggacagggccaacaaacgctaaaattcagtgtggccggacccagcaacatggctgtccagggaagaaactacatacctggacccagctaccgacaacaacgtgtctcaaccactgtgacttttaacaacaacagcgaatttgcttggcctggagcttcttcttgggctctcaatggacgtaatagcttgatgaatcctggacctgctatggccagccacaaagaaggagaggaccgtttctttcctttgtctggatctttaatttttggcaaacaaggaactggaagagacaacgtggatgcggacaaagtcatgataaccaacgaagaagaaattaaaactactaacccggtagcaacggagtcctatggacaagtggccacaaaccaccagagtgcccgggcacaggcgcagaccggctgggttcaaaaccaaggaatacttccgggtatggtttggcaggacagagatgtgtacctgcaaggacccatttgggccaaaattcctcacacggacggcaactttcacccttctccgctgatgggagggtttggaatgaagcacccgcctcctcagatcctcatcaaaaacacacctgtacctgcggatcctccaacggccttcaacaagggcaagctgaactctttcatcacccagtattctactggccaagtcagcgtggagatcgagtgggagctgcagaaggaaaacagcaagcgctggaacccggagatccagtacacttccaactattacaagtctaataatgttgaatttgctgttaatactgaaggtgtatatagtgaaccccgccccattggcaccagatacctgactcgtaatctg

SEQ ID NO: 918 - protein, 736 aa, synthetic construct
  REGION 1..736: note = Adeno Associated Virus Capsid Protein Variant
MAADGYLPDWLEDNLSEGIREWWALKPGAPQPKANQQHQDNARGLVLPGYKYLGPGNGLDKGEPVNAADAAALEHDKAYDEQLKAGDNPYLKYNHADAEFQERLKEDTSFGGNLGRAVFQAKKRLLEPLGLVEEAAKTAPGKKRPVEQSPQEPDSSAGIGKSGAQPAKKRLNFGQTGDTESVPDPQPIGEPPAAPSGVGSLTMASGGGAPVADNNEGADGVGSSSGNWHCDSQWLGDRVITTSTRTWALPTYNNHLYKQISNSTSGGSSNDNAYFGYSTPWGYFDFNRFHCHFSPRDWQRLINNNWGFRPKRLNFKLFNIQVKEVTDNNGVKTIANNLTSTVQVFTDSDYQLPYVLGSAHEGCLPPFPADVFMIPQYGYLTLNDGSQAVGRSSFYCLEYFPSQMLRTGNNFQFSYEFENVPFHSSYAHSQSLDRLMNPLIDQYLYYLSKTINGSGQGQQTLKFSVAGPSNMAVQGRNYIPGPSYRQQRVSTTVTFNNNSEFAWPGASSWALNGRNSLMNPGPAMASHKEGEDRFFPLSGSLIFGKQGTGRDNVDADKVMITNEEEIKTTNPVATESYGQVATNHQSARAQAQTGWVQNQGILPGMVWQDRDVYLQGPIWAKIPHTDGNFHPSPLMGGFGMKHPPPQILIKNTPVPADPPTAFNKGKLNSFITQYSTGQVSVEIEWELQKENSKRWNPEIQYTSNYYKSNNVEFAVNTEGVYSEPRPIGTRYLTRNL

SEQ ID NO: 919 - DNA, 2208 bp, synthetic construct
  misc_feature 1..2208: note = Adeno Associated Virus Capsid Protein Variant
  source 1..2208: mol_type = other DNA
atggctgccgatggttatcttccagattggctcgaggacaaccttagtgaaggaattcgcgagtggtgggctttgaaacctggagcccctcaacccaaggcaaatcaacaacatcaagacaacgctcgaggtcttgtgcttccgggttacaaataccttggacccggcaacggactcgacaagggggagccggtcaacgcagcagacgcggcggccctcgagcacgacaaggcctacgaccagcagctcaaggccggagacaacccgtacctcaagtacaaccacgccgacgccgagttccaggagcggctcaaagaagatacgtcttttgggggcaacctcgggcgagcagtcttccaggccaaaaagaggcttcttgaacctcttggtctggttgaggaagcggctaagacggctcctggaaagaagaggcctgtagagcagtctcctcaggaaccggactcctccgcgggtattggcaaatcgggtgcacagcccgctaaaaagagactcaatttcggtcagactggcgacacagagtcagtcccagaccctcaaccaatcggagaacctcccgcagccccctcaggtgtgggatctcttacaatggcttcaggtggtggcgcaccagtggcagacaataacgaaggtgccgatggagtgggtagttcctcgggaaattggcattgcgattcccaatggctgggggacagagtcatcaccaccagcacccgaacctgggccctgcccacctacaacaatcacctctacaagcaaatctccaacagcacatctggaggatcttcaaatgacaacgcctacttcggctacagcaccccctgggggtattttgacttcaacagattccactgccacttctcaccacgtgactggcagcgactcatcaacaacaactggggattccggcctaagcgactcaacttcaagctcttcaacattcaggtcaaagaggttacggacaacaatggagtcaagaccatcgccaataaccttaccagcacggtccaggtcttcacggactcagactatcagctcccgtacgtgctcgggtcggctcacgagggctgcctcccgccgttcccagcggacgttttcatgattcctcagtacgggtatctgacgcttaatgatggaagccaggccgtgggtcgttcgtccttttactgcctggaatatttcgggtcgcaaatgctaagaacgggtaacaacttccagttcaggtacgagtttgagaacgtacctttccatagcagctacgctcacagccaaagcctggaccgactaatgaatccactcatcgaccaatacttgtactatctctcaaagactattaacggttctggacagggccaacaaacgctaaaattcagtgtggccggacccagcaacatggctgtccagggaagaaactacatacctggacccagctaccctcaacaacgtgtctcaaccactgtgacttttaacaacaacagcgaatttgcttggcctggagcttcttcttgggctctcaatggacgtaatagcttgatgaatcctggacctgctatggccagccacaaagaaggagaggaccgtttctttcctttgtctggatctttaatttttggcaaacaaggaactggaagagacaacgtggatgcggacaaagtcatgataaccaacgaagaagaaattaaaactactaacccggtagcaacggagtcctatggacaagtggccacaaaccaccagagtgcccgggcacaggcgcagaccggctgggttcaaaaccaaggaatacttccgggtatggtttggcaggacagagatgtgtacctgcaaggacccatttgggccaaaattcctcacacggacggcaactttcacccttctccgctgatgggagggtttggaatgaagcacccgcctcctcagatcctcatcaaaaacacacctgtacctgcggatcctccaacggccttcaacaagggcaagctgaactctttcatcacccagtattctactggccaagtcagcgtggagatcgagtgggagctgcagaaggaaaacagcaagcgctggaacccggagatccagtacacttccaactattacaagtctaataatgttgaatttgctgttaatactgaaggtgtatatagtgaaccccgccccattggcaccagatacctgactcgtaatctg

SEQ ID NO: 920 - protein, 736 aa, synthetic construct
  REGION 1..736: note = Adeno Associated Virus Capsid Protein Variant
MAADGYLPDWLEDNLSEGIREWWALKPGAPQPKANQQHQDNARGLVLPGYKYLGPGNGLDKGEPVNAADAAALEHDKAYDQQLKAGDNPYLKYNHADAEFQERLKEDTSFGGNLGRAVFQAKKRLLEPLGLVEEAAKTAPGKKRPVEQSPQEPDSSAGIGKSGAQPAKKRLNFGQTGDTESVPDPQPIGEPPAAPSGVGSLTMASGGGAPVADNNEGADGVGSSSGNWHCDSQWLGDRVITTSTRTWALPTYNNHLYKQISNSTSGGSSNDNAYFGYSTPWGYFDFNRFHCHFSPRDWQRLINNNWGFRPKRLNFKLFNIQVKEVTDNNGVKTIANNLTSTVQVFTDSDYQLPYVLGSAHEGCLPPFPADVFMIPQYGYLTLNDGSQAVGRSSFYCLEYFGSQMLRTGNNFQFRYEFENVPFHSSYAHSQSLDRLMNPLIDQYLYYLSKTINGSGQGQQTLKFSVAGPSNMAVQGRNYIPGPSYPQQRVSTTVTFNNNSEFAWPGASSWALNGRNSLMNPGPAMASHKEGEDRFFPLSGSLIFGKQGTGRDNVDADKVMITNEEEIKTTNPVATESYGQVATNHQSARAQAQTGWVQNQGILPGMVWQDRDVYLQGPIWAKIPHTDGNFHPSPLMGGFGMKHPPPQILIKNTPVPADPPTAFNKGKLNSFITQYSTGQVSVEIEWELQKENSKRWNPEIQYTSNYYKSNNVEFAVNTEGVYSEPRPIGTRYLTRNL

SEQ ID NO: 921 - DNA, 2208 bp, synthetic construct
  misc_feature 1..2208: note = Adeno Associated Virus Capsid Protein Variant
  source 1..2208: mol_type = other DNA
atggctgccgatggttatcttccagattggctcgaggacaaccttagtgaaggaattcgcgagtggtgggctttgaaacctggagcccctcaacccaaggcaaatcaacaacatcaagacaacgctcgaggtcttgtgcttccgggttacaaataccttggacccggcaacggactcgacaagggggagccggtcaacgcagcagacgcggcggccctcgagcacgacaaggcctacgaccagcagctcaaggccggagacaacccgtacctcaagtacaaccacgccgacgccgagttccaggagcggctcaaagaagatacgtcttttgggggcaacctcgggcgagcagtcttccaggccaaaaagaggcttcttgaacctcttggtctggttgaggaagcggctaagacggctcctggaaagaagaggcctgtagagcagtctcctcaggaaccggactcctccgcgggtattggcaaatcgggtgcacagcccgctaaaaagagactcaatttcggtcagactggcgacacagagtcagtcccagaccctcaaccaatcggagaacctcccgcagccccctcaggtgtgggatctcttacaatggcttcaggtggtggcgcaccagtggcagacaataacgaaggtgccgatggagtgggtagttcctcgggaaattggcattgcgattcccaatggctgggggacagagtcatcaccaccagcacccgaacctgggccctgcccacctacaacaatcacctctacaagcaaatctccaacagcacatctggaggatcttcaaatgacaacgcctacttcggctacagcaccccctgggggtattttgacttcaacagattccactgccacttctcaccacgtgactggcagcgactcatcaacaacaactggggattccggcctaagcgactcaacttcaagctcttcaacattcaggtcaaagaggttacggacaacaatggagtcaagaccatcgccaataaccttaccagcacggtccaggtcttcacggactcagactatcagctcccgtacgtgctcgggtcggctcacgagggctgcctcccgccgttcccagcggacgttttcatgattcctcagtacgggtatctgacgcttaatgatggaagccaggccgtgggtcagtcgtccttttactgcctggaatatttcccgtcgcaaatgctaagaacgggtaacaacttccagttcagctacgagtttgagaacgtacctttccatagcagctacgctcacagccaaagcctggaccgactaatgaatccactcatcgaccaatacttgtactatctctcaaagactattaacggtcagggacagggccaacaaacgctaaaattcagtgtggccggacccagcaacatggctgtccagggaagaaactacatacctggacccagctaccgacaacaacgtgtctcaaccactgtgacttttaacaacaacagcgaatttgcttggcctggagcttcttcttgggctctcaatggacgtaatagcttgatgaatcctggacctgctatggccagccacaaagaaggagaggaccgtttctttcctttgtctggatctttaatttttggcaaacaaggaactggaagagacaacgtggatgcggacaaagtcatgataaccaacgaagaagaaattaaaactactaacccggtagcaacggagtcctatggacaagtggccacaaaccaccagagtgcccgggcacaggcgcagaccggctttgttcaaaaccaaggaatacttccgggtatggtttggcaggacagagatgtgtacctgcaaggacccatttgggccaaaattcctcacacggacggcaactttcacccttctccgctgatgggagggtttggaatgaagcacccgcctcctcagatcctcatcaaaaacacacctgtacctgcggatcctccaacggccttcaacaagggcaagctgaactctttcatcacccagtattctactggccaagtcagcgtggagatcgagtgggagctgcagaaggaaaacagcaagcgctggaacccggagatccagtacacttccaactattacaagtctaataatgttgaatttgctgttaatactgaaggtgtatatagtgaaccccgccccattggcaccagatacctgactcgtaatctg

SEQ ID NO: 922 - protein, 736 aa, synthetic construct
  REGION 1..736: note = Adeno Associated Virus Capsid Protein Variant
MAADGYLPDWLEDNLSEGIREWWALKPGAPQPKANQQHQDNARGLVLPGYKYLGPGNGLDKGEPVNAADAAALEHDKAYDQQLKAGDNPYLKYNHADAEFQERLKEDTSFGGNLGRAVFQAKKRLLEPLGLVEEAAKTAPGKKRPVEQSPQEPDSSAGIGKSGAQPAKKRLNFGQTGDTESVPDPQPIGEPPAAPSGVGSLTMASGGGAPVADNNEGADGVGSSSGNWHCDSQWLGDRVITTSTRTWALPTYNNHLYKQISNSTSGGSSNDNAYFGYSTPWGYFDFNRFHCHFSPRDWQRLINNNWGFRPKRLNFKLFNIQVKEVTDNNGVKTIANNLTSTVQVFTDSDYQLPYVLGSAHEGCLPPFPADVFMIPQYGYLTLNDGSQAVGQSSFYCLEYFPSQMLRTGNNFQFSYEFENVPFHSSYAHSQSLDRLMNPLIDQYLYYLSKTINGQGQGQQTLKFSVAGPSNMAVQGRNYIPGPSYRQQRVSTTVTFNNNSEFAWPGASSWALNGRNSLMNPGPAMASHKEGEDRFFPLSGSLIFGKQGTGRDNVDADKVMITNEEEIKTTNPVATESYGQVATNHQSARAQAQTGFVQNQGILPGMVWQDRDVYLQGPIWAKIPHTDGNFHPSPLMGGFGMKHPPPQILIKNTPVPADPPTAFNKGKLNSFITQYSTGQVSVEIEWELQKENSKRWNPEIQYTSNYYKSNNVEFAVNTEGVYSEPRPIGTRYLTRNL

SEQ ID NO: 923 - DNA, 2208 bp, synthetic construct
  misc_feature 1..2208: note = Adeno Associated Virus Capsid Protein Variant
  source 1..2208: mol_type = other DNA
atggctgccgatggttatcttccagattggctcgaggacaaccttagtgaaggaattcgcgagtggtgggctttgaaacctggagcccctcaacccaaggcaaatcaacaacatcaagacaacgctcgaggtcttgtgcttccgggttacaaataccttggacccggcaacggactcgacaagggggagccggtcaacgcagcagacgcggcggccctcgagcacgacaaggcctacgaccagcagctcaaggccggagacaacccgtacctcaagtacaaccacgccgacgccgagttccaggagcggctcaaagaagatacgtcttttgggggcaacctcgggcgagcagtcttccaggccaaaaagaggcttcttgaacctcttggtctggttgaggaagcggctaagacggctcctggaaagaagaggcctgtagagcagtctcctcaggaaccggactcctccgcgggtattggcaaatcgggtgcacagcccgctaaaaagagactcaatttcggtcagactggcgacacagagtcagtcccagaccctcaaccaatcggagaacctcccgcagccccctcaggtgtgggatctcttacaatggcttcaggtggtggcgcaccagtggcagacaataacgaaggtgccgatggagtgggtagttcctcgggaaattggcattgcgattcccaatggctgggggacagagtcatcaccaccagcacccgaacctgggccctgcccacctacaacaatcacctctacaagcaaatctccaacagcacatctggaggatcttcaaatgacaacgcctacttcggctacagcaccccctgggggtattttgacttcaacagattccactgccacttctcaccacgtgactggcagcgactcatcaacaacaactggggattccggcctaagcgactcaacttcaagctcttcaacattcaggtcaaagaggttacggacaacaatggagtcaagaccatcgccaataaccttaccagcacggtccaggtcttcacggactcagactatcagctcccgtacgtgctcgggtcggctcacgagggctgcctcccgccgttcccagcggacgttttcatgattcctcagtacgggtatctgacgcttaatgatggaagccaggccgtgggtcgttcgtccttttactgcctggaatatttcccgtcgcaaatgctaagaacgggtaacaacttccagttcagctacgagtttgagaacgtacctttccatagcagctacgctcacagccaaagcctggaccgactaatgaatccactcatcgaccaatacttgtactatctatcaaagactattaacggttctggacagggccaacaaacgctaaaattcagtgtggccggacccagcaacatggctgtccagggaagaaactacatacctggacccagctaccgacaacaacgtgtctcaaccactgtgacttttaacaacaacagcgaatttgcttggcctggagcttcttcttgggctctcaatggacgtaatagcttgatgaatcctggacctgctatggccagccacaaagcaggagaggaccgtttctttcctttgtctggatctttaatttttggcaaacaaggaactggaagagacaacgtggatgcggacaaagtcatgataaccaacgaagaagaaattaaaactactaacccggtagcaacggagtcctatggacaagtggccacaaaccaccagagtgcccgggcacaggcgcagaccggctgggttcaaaaccaaggaatacttccgggtatggtttggcaggacagagatgtgtacctgcaaggacccatttgggccaaaattcctcacacggacggcaactttcacccttctccgctgatgggagggtttggaatgaagcacccgcctcctcagatcctcatcaaaaacacacctgtacctgcggatcctccaacggccttcaacaagggcaagctgaactctttcatcacccagtattctactggccaagtcagcgtggagatcgagtgggagctgcagaaggaaaacagcaagcgctggaacccggagatccagtacacttccaactattacaagtctaataatgttgaatttgctgttaatactgaaggtgtatatagtgaaccccgccccattggcaccagatacctgactcgtaatctg

SEQ ID NO: 924 - protein, 736 aa, synthetic construct
  REGION 1..736: note = Adeno Associated Virus Capsid Protein Variant
MAADGYLPDWLEDNLSEGIREWWALKPGAPQPKANQQHQDNARGLVLPGYKYLGPGNGLDKGEPVNAADAAALEHDKAYDQQLKAGDNPYLKYNHADAEFQERLKEDTSFGGNLGRAVFQAKKRLLEPLGLVEEAAKTAPGKKRPVEQSPQEPDSSAGIGKSGAQPAKKRLNFGQTGDTESVPDPQPIGEPPAAPSGVGSLTMASGGGAPVADNNEGADGVGSSSGNWHCDSQWLGDRVITTSTRTWALPTYNNHLYKQISNSTSGGSSNDNAYFGYSTPWGYFDFNRFHCHFSPRDWQRLINNNWGFRPKRLNFKLFNIQVKEVTDNNGVKTIANNLTSTVQVFTDSDYQLPYVLGSAHEGCLPPFPADVFMIPQYGYLTLNDGSQAVGRSSFYCLEYFPSQMLRTGNNFQFSYEFENVPFHSSYAHSQSLDRLMNPLIDQYLYYLSKTINGSGQGQQTLKFSVAGPSNMAVQGRNYIPGPSYRQQRVSTTVTFNNNSEFAWPGASSWALNGRNSLMNPGPAMASHKAGEDRFFPLSGSLIFGKQGTGRDNVDADKVMITNEEEIKTTNPVATESYGQVATNHQSARAQAQTGWVQNQGILPGMVWQDRDVYLQGPIWAKIPHTDGNFHPSPLMGGFGMKHPPPQILIKNTPVPADPPTAFNKGKLNSFITQYSTGQVSVEIEWELQKENSKRWNPEIQYTSNYYKSNNVEFAVNTEGVYSEPRPIGTRYLTRNL

SEQ ID NO: 925 - DNA, 2208 bp, synthetic construct
  misc_feature 1..2208: note = Adeno Associated Virus Capsid Protein Variant
  source 1..2208: mol_type = other DNA
atggctgccgatggttatcttccagattggctcgaggacaaccttagtgaaggaattcgcgagtggtgggctttgaaacctggagcccctcaacccaaggcaaatcaacaacatcaagacaacgctcgaggtcttgtgcttccgggttacaaataccttggacccggcaacggactcgacaagggggagccggtcaacgcagcagacgcggcggccctcgagcacgacaaggcctacgaccagcagctcaaggccggagacaacccgtacctcaagtacaaccacgccgacgccgagttccaggagcggctcaaagaagatacgtcttttgggggcaacctcgggcgagcagtcttccaggccaaaaagaggcttcttgaacctcttggtctggttgaggaagcggctaagacggctcctggaaagaagaggcctgtagagcagtctcctcaggaaccggactcctccgcgggtattggcaaatcgggtgcacagcccgctaaaaagagactcaatttcggtcagactggcgacacagagtcagtcccagaccctcaaccaatcggagaacctcccgcagccccctcaggtgtgggatctcttacaatggcttcaggtggtggcgcaccagtggcagacaataacgaaggtgccgatggagtgggtagttcctcgggaaattggcattgcgattcccaatggctgggggacagagtcatcaccaccagcacccgaacctgggccctgcccacctacaacaatcacctctacaagcaaatctccaacagcacatctggaggatcttcaaatgacaacgcctacttcggctacagcaccccctgggggtattttgacttcaacagattccactgccacttctcaccacgtgactggcagcgactcatcaacaacaactggggattccggcctaagcgactcaacttcaagctcttcaacattcaggtcaaagaggttacggacaacaatggagtcaagaccatcgccaataaccttaccagcacggtccaggtcttcacggactcagactatcagctcccgtacgtgctcgggtcggctcacgagggctgcctcccgccgttcccagcggacgttttcatgattcctcagtacgggtatctgacgcttaatgatggaagccaggccgtgggtcgttcgtccttttactgcctggaatatttcccgtcgcaaatgctaagaacgggtaacaacttccagttcagctacgagtttgagaacgtacctttccatagcagctacgctcacagccaaagcctggaccgactaatgaatccactcatcgaccaatacttgtactatctctcaaagactattaacggttctggacagggccaacaaacgctaaaattcagtgtggccggacccagcaacatggctgtccagggaagaaactacatacctggacccagctaccgacaacaacgtgtctcaaccactgtgacttttaacaacaacagcgaatttgcttggcctggagcttcttcttgggctctcaatggacgtaatagcttgatgaatcctggacctgctatggccagccacaaagcgggagaggaccgtttctttcctttgtctggatctttaatttttggcaaacaaggaactggaagagacagtgtggatgcggacaaagtcatgataaccaacgaagaagaaattaaaactactaacccggtagcaacggagtcctatggacaagtggccacaaaccaccagagtgcccaggcacaggcgcagaccggctgggttcaaaaccaaggaatacttccgggtatggtttggcaggacagagatgtgtacctgcaaggacccatttgggccaaaattcctcacacggacggcaactttcacccttctccgctgatgggagggtttggaatgaagcacccgcctcctcagatcctcatcaaaaacacacctgtacctgcggatcctccaacggccttcaacaagggcaagctgaactctttcatcacccagtattctactggccaagtcagcgtggagatcgagtgggagctgcagaaggaaaacagcaagcgctggaacccggagatccagtacacttccaactattacaagtctaataatgttgaatttgctgttgatactgaaggtgtatatagtgaaccccgccccattggcaccagatacctgactcgtaatctg

SEQ ID NO: 926 - protein, 736 aa, synthetic construct
  REGION 1..736: note = Adeno Associated Virus Capsid Protein Variant
MAADGYLPDWLEDNLSEGIREWWALKPGAPQPKANQQHQDNARGLVLPGYKYLGPGNGLDKGEPVNAADAAALEHDKAYDQQLKAGDNPYLKYNHADAEFQERLKEDTSFGGNLGRAVFQAKKRLLEPLGLVEEAAKTAPGKKRPVEQSPQEPDSSAGIGKSGAQPAKKRLNFGQTGDTESVPDPQPIGEPPAAPSGVGSLTMASGGGAPVADNNEGADGVGSSSGNWHCDSQWLGDRVITTSTRTWALPTYNNHLYKQISNSTSGGSSNDNAYFGYSTPWGYFDFNRFHCHFSPRDWQRLINNNWGFRPKRLNFKLFNIQVKEVTDNNGVKTIANNLTSTVQVFTDSDYQLPYVLGSAHEGCLPPFPADVFMIPQYGYLTLNDGSQAVGRSSFYCLEYFPSQMLRTGNNFQFSYEFENVPFHSSYAHSQSLDRLMNPLIDQYLYYLSKTINGSGQGQQTLKFSVAGPSNMAVQGRNYIPGPSYRQQRVSTTVTFNNNSEFAWPGASSWALNGRNSLMNPGPAMASHKAGEDRFFPLSGSLIFGKQGTGRDSVDADKVMITNEEEIKTTNPVATESYGQVATNHQSAQAQAQTGWVQNQGILPGMVWQDRDVYLQGPIWAKIPHTDGNFHPSPLMGGFGMKHPPPQILIKNTPVPADPPTAFNKGKLNSFITQYSTGQVSVEIEWELQKENSKRWNPEIQYTSNYYKSNNVEFAVDTEGVYSEPRPIGTRYLTRNL

SEQ ID NO: 927 - DNA, 2208 bp, synthetic construct
  misc_feature 1..2208: note = Adeno Associated Virus Capsid Protein Variant
  source 1..2208: mol_type = other DNA
atggctgccgatggttatcttccagattggctcgaggacaaccttagtgaaggaattcgcgagtggtgggctttgaaacctggagcccctcaacccaaggcaaatcaacaacatcaagacaacgctcgaggtcttgtgcttccgggttacaaataccttggacccggcaacggactcgacaagggggagccggtcaacgcagcagacgcggcggccctcgagcacgacaaggcctacgaccagcagctcaaggccggagacaacccgtacctcaagtacaaccacgccgacgccgagttccaggagcggctcaaagaagatacgtcttttgggggcaacctcgggcgagcagtcttccaggccaaaaagaggcttcttgaacctcttggtctggttgaggaagcggctaagacggctcctggaaagaagaggcctgtagagcagtctcctcaggaaccggactcctccgcgggtattggcaaatcgggtgcacagcccgctaaaaagagactcaatttcggtcagactggcgacacagagtcagtcccagaccctcaaccaatcggagaacctcccgcagccccctcaggtgtgggatctcttacaatggcttcaggtggtggcgcaccagtggcagacaataacgaaggtgccgatggagtgggtagttcctcgggaaattggcattgcgattcccaatggctgggggacagagtcatcaccaccagcacccgaacctgggccctgcccacctacaacaatcacctctacaagcaaatctccaacagcacatctggaggatcttcaaatgacaacgcctacttcggctacagcaccccctgggggtattttgacttcaacagattccactgccacttctcaccacgtgactggcagcgactcatcaacaacaactggggattccggcctaagcgactcaacttcaagctcttcaacattcaggtcaaagaggttacggacaacaatggagtcaagaccatcgccaataaccttaccagcacggtccaggtcttcacggactcagactatcagctcccgtacgtgctcgggtcggctcacgagggctgcctcccgccgttcccagcggacgttttcatgattcctcagtacgggtatctgacgcttaatgatggaagccaggccgtgggtcgttcgtccttttactgcctggaatatttcccgtcgcaaatgctaagaacgggtaacaacttccagttcagctacgagtttgagaacgtacctttccatagcagctacgctcacagccaaagcctggaccgactaatgaatccactcatcgaccaatacttgtactatctctcaaagactattaacggttctggacagggccaacaaacgctaaaattcagtgtggccggacccagcaacatggctgtccagggaagaaactacatacctggacccagctaccgacaacaacgtgtctcaaccactaccacttttaacaacaacagcgaatttgcttggcctggagcttcttcttgggctctcaatggacgtaatagcttgatgaatcctggacctgctatggccagccacaaagaaggagaggaccgtttctttcctttgtctggatctttaatttttggcaaacaaggaactggaagagacaacgtggatgcggacaaagtcatgataaccaacgaagaagaaattaaaactactaacccggtagcaacggagtcctatggacaagtggccacaaaccacacgagtgcccgggcacaggcgcagaccggctgggttcaaaaccaaggaatacttccgggtatggtttggcaggacagagatgtgtacctgcaaggacccatttgggccaaaattcctcacacggacggcaactttcacccttctccgctgatgggagggtttggaatgaagcacccgcctcctcagatcctcatcaaaaacacacctgtacctgcggatcctccaacggccttcaacaagggcaagacgaactctttcatcacccagtattctactggccaagtcagcgtggagatcgagtgggagctgcagaaggaaaacagcaagcgctggaacccggagatccagtacacttccaactattacaagtctaataatgttgaatttgctgttaatactgaaggtgtatatagtgaaccccgccccattggcaccagatacctgactcgtaatctg

SEQ ID NO: 928 - protein, 736 aa, synthetic construct
  REGION 1..736: note = Adeno Associated Virus Capsid Protein Variant
MAADGYLPDWLEDNLSEGIREWWALKPGAPQPKANQQHQDNARGLVLPGYKYLGPGNGLDKGEPVNAADAAALEHDKAYDQQLKAGDNPYLKYNHADAEFQERLKEDTSFGGNLGRAVFQAKKRLLEPLGLVEEAAKTAPGKKRPVEQSPQEPDSSAGIGKSGAQPAKKRLNFGQTGDTESVPDPQPIGEPPAAPSGVGSLTMASGGGAPVADNNEGADGVGSSSGNWHCDSQWLGDRVITTSTRTWALPTYNNHLYKQISNSTSGGSSNDNAYFGYSTPWGYFDFNRFHCHFSPRDWQRLINNNWGFRPKRLNFKLFNIQVKEVTDNNGVKTIANNLTSTVQVFTDSDYQLPYVLGSAHEGCLPPFPADVFMIPQYGYLTLNDGSQAVGRSSFYCLEYFPSQMLRTGNNFQFSYEFENVPFHSSYAHSQSLDRLMNPLIDQYLYYLSKTINGSGQGQQTLKFSVAGPSNMAVQGRNYIPGPSYRQQRVSTTTTFNNNSEFAWPGASSWALNGRNSLMNPGPAMASHKEGEDRFFPLSGSLIFGKQGTGRDNVDADKVMITNEEEIKTTNPVATESYGQVATNHTSARAQAQTGWVQNQGILPGMVWQDRDVYLQGPIWAKIPHTDGNFHPSPLMGGFGMKHPPPQILIKNTPVPADPPTAFNKGKTNSFITQYSTGQVSVEIEWELQKENSKRWNPEIQYTSNYYKSNNVEFAVNTEGVYSEPRPIGTRYLTRNL

SEQ ID NO: 929 - DNA, 2208 bp, synthetic construct
  misc_feature 1..2208: note = Adeno Associated Virus Capsid Protein Variant
  source 1..2208: mol_type = other DNA
atggctgccgatggttatcttccagattggctcgaggacaaccttagtgaaggaattcgcgagtggtgggctttgaaacctggagcccctcaacccaaggcaaatcaacaacatcaagacaacgctcgaggtcttgtgcttccgggttacaaataccttggacccggcaacggactcgacaagggggagccggtcaacgcagcagacgcggcggccctcgagcacgacaaggcctacgaccagcagctcaaggccggagacaacccgtacctcaagtacaaccacgccgacgccgagttccaggagcggctcaaagaagatacgtcttttgggggcaacctcgggcgagcagtcttccaggccaaaaagaggcttcttgaacctcttggtctggttgaggaagcggctaagacggctcctggaaagaagaggcctgtagagcagtctcctcaggaaccggactcctccgcgggtattggcaaatcgggtgcacagcccgctaaaaagagactcaatttcggtcagactggcgacacagagtcagtcccagaccctcaaccaatcggagaacctcccgcagccccctcaggtgtgggatctcttacaatggcttcaggtggtggcgcaccagtggcagacaataacgaaggtgccgatggagtgggtagttcctcgggaaattggcattgcgattcccaatggctgggggacagagtcatcaccaccagcacccgaacctgggccctgcccacctacaacaatcacctctacaagcaaatctccaacagcacatctggaggatctacaaatgacaacgcctacttcggctacagcaccccctgggggtattttgacttcaacagattccactgccacttctcaccacgtgactggcagcgactcatcaacaacaactggggattccggcctaagcgactcaacttcaagctcttcaacattcaggtcaaagaggttacggacaacaatggagtcaagaccatcgccaataaccttaccagcacggtccaggtcttcacggactcagactatcagctcccgtacgtgctcgggtcggctcacgagggctgcctcccgccgttcccagcggacgttttcatgattcctcagtacgggtatctgacgcttaatgatggaagccaggccgtgggtcgttcgtccttttactgcctggaatatttcccgtcgcaaatgctaagaacgggtaacaacttccagttcagctacgagtttgagaacgtacctttccatagcagctacgctcacagccaaagcctggaccgactaatgaatccactcatcgaccaatacttgtactatctctcaaagactattaacggttctggacagggccaacaaacgctaaaattcagtgtggccggacccagcaacatggctgtccagggaagaaactacatacctggacccagctaccgacaacaacgtgtctcaaccactgtgacttttaacaacaacagcgaatttgcttggcctggagcttcttcttgggctctcaatggacgtaatagcttgatgaatcctggacctgctatggccagccacaaagaaggagaggaccgtttctttcctttgtctggatctttaatttttggcaaacaaggaactggaagagacaacgtggatgcggacaaagtcatgataaccaacgaagaagaaattaaaactactaacccggtagcaacggagtcctatggacaagtggccacaaaccaccagagtgcccgggcacaggcgcagaccggctgggttcaaaaccaaggaatacttccgggtatggtttggcaggacagagatgtgtacctgcaaggacccatttgggccaaaattcctcacacggacggcaactttcacccttctccgctgatgggagggtttggaatgaagcacccgcctcctcagatcctcatcaaaaacacacctgtacctgcggatcctccaacggccttcaacaagggcaagctgaactctttcatcacccagtattctactggccaagtcagcgtggagatcgagtgggagctgcagaaggaaaacagcaagcgctggaacccggagatccagtacacttccaactattacaagtctaataatgttgaatttgctgttaatactgaaggtgtatatagtgaaccccgccccattggcaccagatacctgactcgtaatctg

SEQ ID NO: 930 - protein, 736 aa, synthetic construct
  REGION 1..736: note = Adeno Associated Virus Capsid Protein Variant
MAADGYLPDWLEDNLSEGIREWWALKPGAPQPKANQQHQDNARGLVLPGYKYLGPGNGLDKGEPVNAADAAALEHDKAYDQQLKAGDNPYLKYNHADAEFQERLKEDTSFGGNLGRAVFQAKKRLLEPLGLVEEAAKTAPGKKRPVEQSPQEPDSSAGIGKSGAQPAKKRLNFGQTGDTESVPDPQPIGEPPAAPSGVGSLTMASGGGAPVADNNEGADGVGSSSGNWHCDSQWLGDRVITTSTRTWALPTYNNHLYKQISNSTSGGSTNDNAYFGYSTPWGYFDFNRFHCHFSPRDWQRLINNNWGFRPKRLNFKLFNIQVKEVTDNNGVKTIANNLTSTVQVFTDSDYQLPYVLGSAHEGCLPPFPADVFMIPQYGYLTLNDGSQAVGRSSFYCLEYFPSQMLRTGNNFQFSYEFENVPFHSSYAHSQSLDRLMNPLIDQYLYYLSKTINGSGQGQQTLKFSVAGPSNMAVQGRNYIPGPSYRQQRVSTTVTFNNNSEFAWPGASSWALNGRNSLMNPGPAMASHKEGEDRFFPLSGSLIFGKQGTGRDNVDADKVMITNEEEIKTTNPVATESYGQVATNHQSARAQAQTGWVQNQGILPGMVWQDRDVYLQGPIWAKIPHTDGNFHPSPLMGGFGMKHPPPQILIKNTPVPADPPTAFNKGKLNSFITQYSTGQVSVEIEWELQKENSKRWNPEIQYTSNYYKSNNVEFAVNTEGVYSEPRPIGTRYLTRNL

SEQ ID NO: 931 - DNA, 2208 bp, synthetic construct
  misc_feature 1..2208: note = Adeno Associated Virus Capsid Protein Variant
  source 1..2208: mol_type = other DNA
atggctgccgatggttatcttccagattggctcgaggacaaccttagtgaaggaattcgcgagtggtgggctttgaaacctggagcccctcaacccaaggcaaatcaacaacatcaagacaacgctcgaggtcttgtgcttccgggttacaaataccttggacccggcaacggactcgacaagggggagccggtcaacgcagcagacgcggcggccctcgagcacgacaaggcctacgaccagcagctcaaggccggagacaacccgtacctcaagtacaaccacgccgacgccgagttccaggagcggctcaaagaagatacgtcttttgggggcaacctcgggcgagcagtcttccaggccaaaaagaggcttcttgaacctcttggtctggttgaggaagcggctaagacggctcctggaaagaagaggcctgtagagcagtctcctcaggaaccggactcctccgcgggtattggcaaatcgggtgcacagcccgctaaaaagagactcaatttcggtcagactggcgacacagagtcagtcccagaccctcaaccaatcggagaacctcccgcagccccctcaggtgtgggatctcttacaatggcttcaggtggtggcgcaccagtggcagacaataacgaaggtgccgatggagtgggtagttcctcgggaaattggcattgcgattcccaatggctgggggacagagtcatcaccaccagcacccgaacctgggccctgcccacctacaacaatcacctctacaagcaaatctccaacagcacatctggaggatcttcaaatgacaacgcctacttcggctacagcaccccctgggggtattttgacttcaacagattccactgccacttctcaccacgtgactggcagcgactcatcaacaacaactggggattccggcctaagcgactcaacttcaagctcttcaacattcaggtcaaagaggttacggacaacaatggagtcaagaccatcgccaataaccttaccagcacggtccaggtcttcacggactcagactatcagctcccgtacgtgctcgggtcggctcacgagggctgcctcccgccgttcccagcggacgttttcatgattcctcagtacgggtatctgacgcttaatgatggaagccaggccgtgggtcgttcgtccttttactgcctggaatatttcccgtcgcaaatgctaagaacgggtaacaacttccagttcagctacgagtttgagaacgtacctttccatagcagctacgctcacagccaaagcctggaccgactaatgaatccactcatcgaccaatacttgtactatctctcaaagactattaacggttctggacagggccaacaaacgctaaaattcagtgtggccggacccagcaacatggctgtccagggaagaaactacatacctggacccagctaccgacaacaacgtgtctcaaccactgtgacttttaacaacaacagcgaatttgcttggcctggagcttcttcttgggctctcaatggacgtaatagcttgatgaatcctggacctgctatggccagccacaaagaaggagaggaccgtttctttcctttgtctggatctttaatttttggcaaacaaggaactggaagagacagtgtggatgcggacaaagtcatgataaccaacgaagaagaaattaaaactactaacccggtagcaacggagtcctatggacaagtggccacaaaccaccagagtgcccgggcacaggcgcagaccggctgggttcaaaaccaaggaatacttccgggtatggtttggcaggacagagatgtgtacctgcaaggacccatttgggccaaaattcctcacacggacggcaactttcacccttctccgctgatgggagggtttggaatgaagcacccgcctcctcagatcctcatcaaaaacacacctgtacctgcggatcctccaacggccttcaacaagggcaagctgaactctttcatcacccagtattctactggccaagtcagcgtggagatcgagtgggagctgcagaaggaaaacagcaagcgctggaacccggagatccagtacacttccaactattacaagtctaataatgttgaatttgctgttaatactgaaggtgtatatagtgaaccccgccccattggcaccagatacctgactcgtaatctg

SEQ ID NO: 932 - protein, 736 aa, synthetic construct
  REGION 1..736: note = Adeno Associated Virus Capsid Protein Variant
MAADGYLPDWLEDNLSEGIREWWALKPGAPQPKANQQHQDNARGLVLPGYKYLGPGNGLDKGEPVNAADAAALEHDKAYDQQLKAGDNPYLKYNHADAEFQERLKEDTSFGGNLGRAVFQAKKRLLEPLGLVEEAAKTAPGKKRPVEQSPQEPDSSAGIGKSGAQPAKKRLNFGQTGDTESVPDPQPIGEPPAAPSGVGSLTMASGGGAPVADNNEGADGVGSSSGNWHCDSQWLGDRVITTSTRTWALPTYNNHLYKQISNSTSGGSSNDNAYFGYSTPWGYFDFNRFHCHFSPRDWQRLINNNWGFRPKRLNFKLFNIQVKEVTDNNGVKTIANNLTSTVQVFTDSDYQLPYVLGSAHEGCLPPFPADVFMIPQYGYLTLNDGSQAVGRSSFYCLEYFPSQMLRTGNNFQFSYEFENVPFHSSYAHSQSLDRLMNPLIDQYLYYLSKTINGSGQGQQTLKFSVAGPSNMAVQGRNYIPGPSYRQQRVSTTVTFNNNSEFAWPGASSWALNGRNSLMNPGPAMASHKEGEDRFFPLSGSLIFGKQGTGRDSVDADKVMITNEEEIKTTNPVATESYGQVATNHQSARAQAQTGWVQNQGILPGMVWQDRDVYLQGPIWAKIPHTDGNFHPSPLMGGFGMKHPPPQILIKNTPVPADPPTAFNKGKLNSFITQYSTGQVSVEIEWELQKENSKRWNPEIQYTSNYYKSNNVEFAVNTEGVYSEPRPIGTRYLTRNL

SEQ ID NO: 933 - DNA, 2208 bp, synthetic construct
  misc_feature 1..2208: note = Adeno Associated Virus Capsid Protein Variant
  source 1..2208: mol_type = other DNA
atggctgccgatggttatcttccagattggctcgaggacaaccttagtgaaggaattcgcgagtggtgggctttgaaacctggagcccctcaacccaaggcaaatcaacaacatcaagacaacgctcgaggtcttgtgcttccgggttacaaataccttggacccggcaacggactcgacaagggggagccggtcaacgcagcagacgcggcggccctcgagcacgacaaggcctacgaccagcagctcaaggccggagacaacccgtacctcaagtacaaccacgccgacgccgagttccaggagcggctcaaagaagatacgtcttttgggggcaacctcgggcgagcagtcttccaggccaaaaagaggcttcttgaacctcttggtctggttgaggaagcggctaagacggctcctggaaagaagaggcctgtagagcagtctcctcaggaaccggactcctccgcgggtattggcaaatcgggtgcacagcccgctaaaaagagactcaatttcggtcagactggcgacacagagtcagtcccagaccctcaaccaatcggagaacctcccgcagccccctcaggtgtgggatctcttacaatggcttcaggtggtggcgcaccagtggcagacaataacgaaggtgccgatggagtgggtagttcctcgggaaattggcattgcgattcccaatggctgggggacagagtcatcaccaccagcacccgaacctgggccctgcccacctacaacaatcacctctacaagcaaatctccaacagcacatctggaggatcttcaaatgacaacgcctacttcggctacagcaccccctgggggtattttgacttcaacagattccactgccacttctcaccacgtgactggcagcgactcatcaacaacaactggggattccggcctaagcgactcaacttcaagctcttcaacattcaggtcaaagaggttacggacaacaatggagtcaagaccatcgccaataaccttaccagcacggtccaggtcttcacggactcagactatcagctcccgtacgtgctcgggtcggctcacgagggctgcctcccgccgttcccagcggacgttttcatgattcctcagtacgggtatctgacgcttaatgatggaagccaggccgtgggtcgttcgtccttttactgcctggaatatttcccgtcgcaaatgctaagaacgggtaacaacttccagttcagctacgagtttgagaacgtacctttccatagcagctacgctcacagccaaagcctggaccgactaatgaatccactcatcgaccaatacttgtactatctctcaaagactattaacggttctggacagggccaacaaacgctaaaattcagtgtggccggacccagcaacatggctgtccagggaagaaactacatacctggacccagctaccgacaacaacgtgtctcaaccactgtgacttttaacaacaacagcgaatttgcttggcctggagcttcttcttgggctctcaatggacgtgtaagcttgatgaatcctggacctgctatggccagccacaaagaaggagaggaccgtttctttcctttgtctggatctttaatttttggcaaacaaggaactggaagagacaacgtggatgcggacaaagtcatgataaccaacgaagaagaaattaaaactactaacccggtagcaacggagtcctatggacaagtggccacaaaccaccagagtgcccgggcacaggcgcagaccggctgggttcaaaaccaaggaatacttccgggtatggtttggcaggacagagatgtgtacctgcaaggacccatttgggccaaaattcctcacacggacggcaactttcacccttctccgctgatgggagggtttggaatgaagcacccgcctcctcagatcctcatcaaaaacacacctgtacctgcggatcctccaacggccttcaacaagggcaagctgaactctttcatcacccagtattctactggccaagtcagcgtggagatcgagtgggagctgcagaaggaaaacagcaagcgctggaacccggagatccagtacacttccaactattacaagtctaataatgttgaatttgctgttaatactgaaggtgtatatagtgaaccccgccccattggcaccagatacctgactcgtaatctg

SEQ ID NO: 934 - protein, 736 aa, synthetic construct
  REGION 1..736: note = Adeno Associated Virus Capsid Protein Variant
MAADGYLPDWLEDNLSEGIREWWALKPGAPQPKANQQHQDNARGLVLPGYKYLGPGNGLDKGEPVNAADAAALEHDKAYDQQLKAGDNPYLKYNHADAEFQERLKEDTSFGGNLGRAVFQAKKRLLEPLGLVEEAAKTAPGKKRPVEQSPQEPDSSAGIGKSGAQPAKKRLNFGQTGDTESVPDPQPIGEPPAAPSGVGSLTMASGGGAPVADNNEGADGVGSSSGNWHCDSQWLGDRVITTSTRTWALPTYNNHLYKQISNSTSGGSSNDNAYFGYSTPWGYFDFNRFHCHFSPRDWQRLINNNWGFRPKRLNFKLFNIQVKEVTDNNGVKTIANNLTSTVQVFTDSDYQLPYVLGSAHEGCLPPFPADVFMIPQYGYLTLNDGSQAVGRSSFYCLEYFPSQMLRTGNNFQFSYEFENVPFHSSYAHSQSLDRLMNPLIDQYLYYLSKTINGSGQGQQTLKFSVAGPSNMAVQGRNYIPGPSYRQQRVSTTVTFNNNSEFAWPGASSWALNGRVSLMNPGPAMASHKEGEDRFFPLSGSLIFGKQGTGRDNVDADKVMITNEEEIKTTNPVATESYGQVATNHQSARAQAQTGWVQNQGILPGMVWQDRDVYLQGPIWAKIPHTDGNFHPSPLMGGFGMKHPPPQILIKNTPVPADPPTAFNKGKLNSFITQYSTGQVSVEIEWELQKENSKRWNPEIQYTSNYYKSNNVEFAVNTEGVYSEPRPIGTRYLTRNL

SEQ ID NO: 935 - DNA, 2208 bp, synthetic construct
  misc_feature 1..2208: note = Adeno Associated Virus Capsid Protein Variant
  source 1..2208: mol_type = other DNA
atggctgccgatggttatcttccagattggctcgaggacaaccttagtgaaggaattcgcgagtggtgggctttgaaacctggagcccctcaacccaaggcaaatcaacaacatcaagacaacgctcgaggtcttgtgcttccgggttacaaataccttggacccggcaacggactcgacaagggggagccggtcaacgcagcagacgcggcggccctcgagcacgacaaggcctacgaccagcagctcaaggccggagacaacccgtacctcaagtacaaccacgccgacgccgagttccaggagcggctcaaagaagatacgtcttttgggggcaacctcgggcgagcagtcttccaggccaaaaagaggcttcttgaacctcttggtctggttgaggaagcggctaagacggctcctggaaagaagaggcctgtagagcagtctcctcaggaaccggactcctccgcgggtattggcaaatcgggtgcacagcccgctaaaaagagactcaatttcggtcagactggcgacacagagtcagtcccagaccctcaaccaatcggagaacctcccgcagccccctcaggtgtgggatctcttacaatggcttcaggtggtggcgcaccagtggcagacaataacgaaggtgccgatggagtgggtagttcctcgggaaattggcattgcgattcccaatggctgggggacagagtcatcaccaccagcacccgaacctgggccctgcccacctacaacaatcacctctacaagcaaatctccaacgctacatctggaggatcttcaaatgacaacgcctacttcggctacagcaccccctgggggtattttgacttcaacagattccactgccacttctcaccacgtgactggcagcgactcatcaacaacaactggggattccggcctaagcgactcaacttcaagctcttcaacattcaggtcaaagaggttacggacaacaatggagtcaagaccatcgccaataaccttaccagcacggtccaggtcttcacggactcagactatcagctcccgtacgtgctcgggtcggctcacgagggctgcctcccgccgttcccagcggacgttttcatgattcctcagtacgggtatctgacgcttaatgatggaagccaggccgtgggtcgttcgtccttttactgcctggaatatttcccgtcgcaaatgctaagaacgggtaacaacttccagttcagctacgagtttgagaacgtacctttccatagcagctacgctcacagccaaagcctggaccgactaatgaatccactcatcgaccaatacttgtactatctctcaaagactattaacggttctggacagggccaacaaacgctaaaattcagtgtggccggacccagcaacatggctgtccagggaagaaactacatacctggacccagctaccgacaacaacgtgtctcaaccactgtgacttttaacaacaacagcgaatttgcttggcctggagcttcttcttgggctctcaatggacgtaatagcttgatgaatcctggacctgctatggccagccacaaagaaggagaggaccgtttctttcctttgtctggatctttaatttttggcaaacaaggaactggaagagacaacgtggatgcggacaaagtcatgataaccaacgaagaagaaattaaaactactaacccggtagcaacggagtcctatggacaagtggccacaaaccaccagagtgcccgggcacaggcgcagaccggctgggttcaaaaccaaggaatacttccgggtatggtttggcaggacagagatgtgtacctgcaaggacccatttgggccaaaattcctcacacggacggcaactttcacccttctccgctgatgggagggtttggaatgaagcacccgcctcctcagatcctcatcaaaaacacacctgtacctgcggatcctccaacggccttcaacaagggcaagctgaactctttcatcacccagtattctactggccaagtcagcgtggagatcgagtgggagctgcagaaggaaaacagcaagcgctggaacccggagatccagtacacttccaactattacaagtctaataatgttgaatttgctgttaatactgaaggtgtatatagtgaaccccgccccattggcaccagatacctgactcgtaatctg

SEQ ID NO: 936 - protein, 736 aa, synthetic construct
  REGION 1..736: note = Adeno Associated Virus Capsid Protein Variant
MAADGYLPDWLEDNLSEGIREWWALKPGAPQPKANQQHQDNARGLVLPGYKYLGPGNGLDKGEPVNAADAAALEHDKAYDQQLKAGDNPYLKYNHADAEFQERLKEDTSFGGNLGRAVFQAKKRLLEPLGLVEEAAKTAPGKKRPVEQSPQEPDSSAGIGKSGAQPAKKRLNFGQTGDTESVPDPQPIGEPPAAPSGVGSLTMASGGGAPVADNNEGADGVGSSSGNWHCDSQWLGDRVITTSTRTWALPTYNNHLYKQISNATSGGSSNDNAYFGYSTPWGYFDFNRFHCHFSPRDWQRLINNNWGFRPKRLNFKLFNIQVKEVTDNNGVKTIANNLTSTVQVFTDSDYQLPYVLGSAHEGCLPPFPADVFMIPQYGYLTLNDGSQAVGRSSFYCLEYFPSQMLRTGNNFQFSYEFENVPFHSSYAHSQSLDRLMNPLIDQYLYYLSKTINGSGQGQQTLKFSVAGPSNMAVQGRNYIPGPSYRQQRVSTTVTFNNNSEFAWPGASSWALNGRNSLMNPGPAMASHKEGEDRFFPLSGSLIFGKQGTGRDNVDADKVMITNEEEIKTTNPVATESYGQVATNHQSARAQAQTGWVQNQGILPGMVWQDRDVYLQGPIWAKIPHTDGNFHPSPLMGGFGMKHPPPQILIKNTPVPADPPTAFNKGKLNSFITQYSTGQVSVEIEWELQKENSKRWNPEIQYTSNYYKSNNVEFAVNTEGVYSEPRPIGTRYLTRNL

SEQ ID NO: 937 - DNA, 2208 bp, synthetic construct
  misc_feature 1..2208: note = Adeno Associated Virus Capsid Protein Variant
  source 1..2208: mol_type = other DNA
atggctgccgatggttatcttccagattggctcgaggacaaccttagtgaaggaattcgcgagtggtgggctttgaaacctggagcccctcaacccaaggcaaatcaacaacatcaagacaacgctcgaggtcttgtgcttccgggttacaaataccttggacccggcaacggactcgacaagggggagccggtcaacgcagcagacgcggcggccctcgagcacgacaaggcctacgaccagcagctcaaggccggagacaacccgtacctcaagtacaaccacgccgacgccgagttccaggagcggctcaaagaagatacgtcttttgggggcaacctcgggcgagcagtcttccaggccaaaaagaggcttcttgaacctcttggtctggttgaggaagcggctaagacggctcctggaaagaagaggcctgtagagcagtctcctcaggaaccggactcctccgcgggtattggcaaatcgggtgcacagcccgctaaaaagagactcaatttcggtcagactggcgacacagagtcagtcccagaccctcaaccaatcggagaacctcccgcagccccctcaggtgtgggatctcttacaatggcttcaggtggtggcgcaccagtggcagacaataacgaaggtgccgatggagtgggtagttcctcgggaaattggcattgcgattcccaatggctgggggacagagtcatcaccaccagcacccgaacctgggccctgcccacctacaacaatcacctctacaagcaaatctccaacagcacatctggaggatcttcactggacaacgcctacttcggctacagcaccccctgggggtattttgacttcaacagattccactgccacttctcaccacgtgactggcagcgactcatcaacaacaactggggattccggcctaagcgactcaacttcaagctcttcaacattcaggtcaaagaggttacggacaacaatggagtcaagaccatcgccaataaccttaccagcacggtccaggtcttcacggactcagactatcagctcccgtacgtgctcgggtcggctcacgagggctgcctcccgccgttcccagcggacgttttcatgattcctcagtacgggtatctgacgcttaatgatggaagccaggccgtgggtcgttcgtccttttactgcctggaatatttcccgtcgcaaatgctaagaacgggtaacaacttccagttcagctacgagtttgagaacgtacctttccatagcagctacgctcacagccaaagcctggaccgactaatgaatccactcatcgaccaatacttgtactatctctcaaagactattaacggttctggacagggccaacaaacgctaaaattcagtgtggccggacccagcaacatggctgtccagggaagaaactacatacctggacccagctaccgacaacaacgtgtctcaaccactgtgacttttaacaacaacagcgaatttgcttggcctggagcttcttcttgggctctcaatggacgtaatagcttgatgaatcctggacctgctatggccagccacaaagaaggagaggaccgtttctttcctttgtctggatctttaatttttggcaaacaaggaactggaagagacaacgtggatgcggacaaagtcatgataaccaacgaagaagaaattaaaactactaacccggtagcaacggagtcctatggacaagtggccacaaaccaccagagtgcccgggcacaggcgcagaccggctgggttcaaaaccaaggaatacttccgggtatggtttggcaggacagagatgtgtacctgcaaggacccatttgggccaaaattcctcacacggacggcaactttcacccttctccgctgatgggagggtttggaatgaagcacccgcctcctcagatcctcatcaaaaacacacctgtacctgcggatcctccaacggccttcaacaagggcaagctgaactctttcatcacccagtattctactggccaagtcagcgtggagatcgagtgggagctgcagaaggaaaacagcaagcgctggaacccggagatccagtacacttccaactattacaagtctaataatgttgaatttgctgttaatactgaaggtgtatatagtgaaccccgccccattggcaccagatacctgactcgtaatctg

SEQ ID NO: 938 - protein, 736 aa, synthetic construct
  REGION 1..736: note = Adeno Associated Virus Capsid Protein Variant
MAADGYLPDWLEDNLSEGIREWWALKPGAPQPKANQQHQDNARGLVLPGYKYLGPGNGLDKGEPVNAADAAALEHDKAYDQQLKAGDNPYLKYNHADAEFQERLKEDTSFGGNLGRAVFQAKKRLLEPLGLVEEAAKTAPGKKRPVEQSPQEPDSSAGIGKSGAQPAKKRLNFGQTGDTESVPDPQPIGEPPAAPSGVGSLTMASGGGAPVADNNEGADGVGSSSGNWHCDSQWLGDRVITTSTRTWALPTYNNHLYKQISNSTSGGSSLDNAYFGYSTPWGYFDFNRFHCHFSPRDWQRLINNNWGFRPKRLNFKLFNIQVKEVTDNNGVKTIANNLTSTVQVFTDSDYQLPYVLGSAHEGCLPPFPADVFMIPQYGYLTLNDGSQAVGRSSFYCLEYFPSQMLRTGNNFQFSYEFENVPFHSSYAHSQSLDRLMNPLIDQYLYYLSKTINGSGQGQQTLKFSVAGPSNMAVQGRNYIPGPSYRQQRVSTTVTFNNNSEFAWPGASSWALNGRNSLMNPGPAMASHKEGEDRFFPLSGSLIFGKQGTGRDNVDADKVMITNEEEIKTTNPVATESYGQVATNHQSARAQAQTGWVQNQGILPGMVWQDRDVYLQGPIWAKIPHTDGNFHPSPLMGGFGMKHPPPQILIKNTPVPADPPTAFNKGKLNSFITQYSTGQVSVEIEWELQKENSKRWNPEIQYTSNYYKSNNVEFAVNTEGVYSEPRPIGTRYLTRNL

SEQ ID NO: 939 - DNA, 2208 bp, synthetic construct
  misc_feature 1..2208: note = Adeno Associated Virus Capsid Protein Variant
  source 1..2208: mol_type = other DNA
atggctgccgatggttatcttccagattggctcgaggacaaccttagtgaaggaattcgcgagtggtgggctttgaaacctggagcccctcaacccaaggcaaatcaacaacatcaagacaacgctcgaggtcttgtgcttccgggttacaaataccttggacccggcaacggactcgacaagggggagccggtcaacgcagcagacgcggcggccctcgagcacgacaaggcctacgaccagcagctcaaggccggagacaacccgtacctcaagtacaaccacgccgacgccgagttccaggagcggctcaaagaagatacgtcttttgggggcaacctcgggcgagcagtcttccaggccaaaaagaggcttcttgaacctcttggtctggttgaggaagcggctaagacggctcctggaaagaagaggcctgtagagcagtctcctcaggaaccggactcctccgcgggtattggcaaatcgggtgcacagcccgctaaaaagagactcaatttcggtcagactggcgacacagagtcagtcccagaccctcaaccaatcggagaacctcccgcagccccctcaggtgtgggatctcttacaatggcttcaggtggtggcgcaccagtggcagacaataacgaaggtgccgatggagtgggtagttcctcgggaaattggcattgcgattcccaatggctgggggacagagtcatcaccaccagcacccgaacctgggccctgcccacctacaacaatcacctctacaagcaaatctccaactctacatctggaggatcttcaaatgacaacgcctacttcggctacagcaccccctgggggtattttgacttcaacagattccactgccacttctcaccacgtgactggcagcgactcatcaacaacaactggggattccggcctaagcgactcaacttcaagctcttcaacattcaggtcaaagaggttacggacaacaatggagtcaagaccatcgccaataaccttaccagcacggtccaggtcttcacggactcagactatcagctcccgtacgtgctcgggtcggctcacgagggctgcctcccgccgttcccagcggacgttttcatgattcctcagtacgggtatctgacgcttaatgatggaagccaggccgtgggtcgttcgtccttttactgcctggaatatttcccgtcgcaaatgctaagaacgggtaacaacttccagttcagctacgagtttgagaacgtacctttccatagcagctacgctcacagccaaagcctggaccgactaatgaatccactcatcgaccaatacttgtactatctctcaaagactattaacggttctggacagggccaacaaacgctaaaattcagtgtggccggacccagcaacatggctgtccagggaagaaactacatacctggacccagctaccgacaacaacgtgtctcaaccactgtgacttttaacaacaacagcgaatttgcttggcctggagcttcttcttgggctctcaatggacgtaatagcttgatgaatcctggacctgctatggccagccacaaagaaggagaggaccgtttctttcctttgtctggatctttaatttttggcaaacaaggaactggaagagacaacgtggatgcggacaaagtcatgataaccaacgaagaagaaattaaaactactaacccggtagcaacggagtcctatggacaagtggccacaaaccaccagagtgcccgggcacaggcgcagaccggctgggttcaaaaccaaggaatacttccgggtatggtttggcaggacagagatgtgtacctgcaaggacccatttgggccaaaattcctcacacggacggcaactttcacccttctccgctgatgggagggtttggaatgaagcacccgcctcctcagatcctcatcaaaaacacacctgtacctgcggatcctccaacggccttcaacaagggcaagctgaactctttcatcacccagtattctactggccaagtcagcgtggagatcgagtgggagctgcagaaggaaaacagcaagcgctggaacccggagatccagtacacttccaactattacaagtctaataatgttgaatttgctgttaatactgaaggtgtatatagtgaaccccgccccattggcaccagatacctgactcgtaatctg

SEQ ID NO: 940 - protein, 736 aa, synthetic construct; identical to SEQ ID NO: 552
  REGION 1..736: note = Adeno Associated Virus Capsid Protein Variant

SEQ ID NO: 941 - DNA, 2208 bp, synthetic construct
  misc_feature 1..2208: note = Adeno Associated Virus Capsid Protein Variant
  source 1..2208: mol_type = other DNA
atggctgccgatggttatcttccagattggctcgaggacaaccttagtgaaggaattcgcgagtggtgggctttgaaacctggagcccctcaacccaaggcaaatcaacaacatcaagacaacgctcgaggtcttgtgcttccgggttacaaataccttggacccggcaacggactcgacaagggggagccggtcaacgcagcagacgcggcggccctcgagcacgacaaggcctacgaccagcagctcaaggccggagacaacccgtacctcaagtacaaccacgccgacgccgagttccaggagcggctcaaagaagatacgtcttttgggggcaacctcgggcgagcagtcttccaggccaaaaagaggcttcttgaacctcttggtctggttgaggaagcggctaagacggctcctggaaagaagaggcctgtagagcagtctcctcaggaaccggactcctccgcgggtattggcaaatcgggtgcacagcccgctaaaaagagactcaatttcggtcagactggcgacacagagtcagtcccagaccctcaaccaatcggagaacctcccgcagccccctcaggtgtgggatctcttacaatggcttcaggtggtggcgcaccagtggcagacaataacgaaggtgccgatggagtgggtagttcctcgggaaattggcattgcgattcccaatggctgggggacagagtcatcaccaccagcacccgaacctgggccctgcccacctacaacaatcacctctacaagcaaatctccaacagcacatctggaggatcttcaaatgacaacgcctacttcggctacagcaccccctgggggtattttgacttcaacagattccactgccacttctcaccacgtgactggcagcgactcatcaacaacaactggggattccggcctaagcgactcaacttcaagctcttcaacattcaggtcaaagaggttacggacaacaatggagtcaagaccatcgccaataaccttaccagcacggtccaggtcttcacggactcagactatcagctcccgtacgtgctcgggtcggctcacgagggctgcctcccgccgttcccagcggacgttttcatgattcctcagtacgggtatctgacgcttaatgatggaagccaggccgtgggtcgttcgtccttttactgcctggaatatttcccgtcgcaaatgctaagaacgggtaacaacttccagttcagctacgagtttgagaacgtacctttccatagcagctacgctcacagccaaagcctggaccgactaatgaatccactcatcgaccaatacttgtactatctctcaaagactattaacggttctggacagggccaacaaacgctaaaattcagtgtggccggacccagcaacatggctgtccagggaagaaactacatacctggacccagctaccgacaacaacgtgtctcaaccactgtgacttttaacaacaacagcgaatttgcttggcctggagcttcttcttgggctctcaatggacgtaatagcttgatgaatcctggacctgctatggccagccacaaagaaggagaggaccgtttctttcctttgtctggatctttaatttttggcaaacaaggaactggaagagacaacgtggatgcggacaaagtcatgataaccaacgaagaagaaattaaaactactaacccggtagcaacggagtcctatggacaagtggccacaaaccaccagagtgcccgggcacaggcgcagaccggctgggttcaaaaccaaggaatacttccgggtatggtttggcaggacagagatgtgtacctgcaaggacccatttgggccaaaattcctcacacggacggcaactttcacccttctccgctgatgggagggtttggaatgaagcacccgcctcctcagatcctcatcaaaaacacacctgtacctgcggatcctccaacggccttcaacaagggcaagctgaactctttcatcacccagtattctactggccaagtcagcgtggagatcgagtgggagctgcagaaggaaaacagcaagcgctggaacccggagatccagtacacttccaactattacaagtctaataatgttgaatttgctgttaatactgaaggtgtatatagtgaaatccgccccattggcaccagatacctgactcgtaatctg

SEQ ID NO: 942 - protein, 736 aa, synthetic construct
  REGION 1..736: note = Adeno Associated Virus Capsid Protein Variant
MAADGYLPDWLEDNLSEGIREWWALKPGAPQPKANQQHQDNARGLVLPGYKYLGPGNGLDKGEPVNAADAAALEHDKAYDQQLKAGDNPYLKYNHADAEFQERLKEDTSFGGNLGRAVFQAKKRLLEPLGLVEEAAKTAPGKKRPVEQSPQEPDSSAGIGKSGAQPAKKRLNFGQTGDTESVPDPQPIGEPPAAPSGVGSLTMASGGGAPVADNNEGADGVGSSSGNWHCDSQWLGDRVITTSTRTWALPTYNNHLYKQISNSTSGGSSNDNAYFGYSTPWGYFDFNRFHCHFSPRDWQRLINNNWGFRPKRLNFKLFNIQVKEVTDNNGVKTIANNLTSTVQVFTDSDYQLPYVLGSAHEGCLPPFPADVFMIPQYGYLTLNDGSQAVGRSSFYCLEYFPSQMLRTGNNFQFSYEFENVPFHSSYAHSQSLDRLMNPLIDQYLYYLSKTINGSGQGQQTLKFSVAGPSNMAVQGRNYIPGPSYRQQRVSTTVTFNNNSEFAWPGASSWALNGRNSLMNPGPAMASHKEGEDRFFPLSGSLIFGKQGTGRDNVDADKVMITNEEEIKTTNPVATESYGQVATNHQSARAQAQTGWVQNQGILPGMVWQDRDVYLQGPIWAKIPHTDGNFHPSPLMGGFGMKHPPPQILIKNTPVPADPPTAFNKGKLNSFITQYSTGQVSVEIEWELQKENSKRWNPEIQYTSNYYKSNNVEFAVNTEGVYSEIRPIGTRYLTRNL

SEQ ID NO: 943 - DNA, 2208 bp, synthetic construct
  misc_feature 1..2208: note = Adeno Associated Virus Capsid Protein Variant
  source 1..2208: mol_type = other DNA
atggctgccgatggttatcttccagattggctcgaggacaaccttagtgaaggaattcgcgagtggtgggctttgaaacctggagcccctcaacccaaggcaaatcaacaacatcaagacaacgctcgaggtcttgtgcttccgggttacaaataccttggacccggcaacggactcgacaagggggagccggtcaacgcagcagacgcggcggccctcgagcacgacaaggcctacgaccagcagctcaaggccggagacaacccgtacctcaagtacaaccacgccgacgccgagcctcaggagcggctcaaagaagatacgtcttttgggggcaacctcgggcgagcagtcttccaggccaaaaagaggcttcttgaacctcttggtctggttgaggaagcggctaagacggctcctggaaagaagaggcctgtagagcagtctcctcaggaaccggactcctccgcgggtattggcaaatcgggtgcacagcccgctaaaaagagactcaatttcggtcagactggcgacacagagtcagtcccagaccctcaaccaatcggagaacctcccgcagccccctcaggtgtgggatctcttacaatggcttcaggtggtggcgcaccagtggcagacaataacgaaggtgccgatggagtgggtagttcctcgggaaattggcattgcgattcccaatggctgggggacagagtcatcaccaccagcacccgaacctgggccctgcccacctacaacaatcacctctacaagcaaatctccaacagcacatctggaggatcttcaaatgacaacgcctacttcggctacagcaccccctgggggtattttgacttcaacagattccactgccacttctcaccacgtgactggcagcgactcatcaacaacaactggggattccggcctaagcgactcaacttcaagctcttcaacattcaggtcaaagaggttacggacaacaatggagtcaagaccatcgccaataaccttaccagcacggtccaggtcttcacggactcagactatcagctcccgtacgtgctcgggtcggctcacgagggctgcctcccgccgttcccagcggacgttttcatgattcctcagtacgggtatctgacgcttaatgatggaagccaggccgtgggtcgttcgtccttttactgcctggaatatttcccgtcgcaaatgctaagaacgggtaacaacttccagttcagctacgagtttgagaacgtacctttccatagcagctacgctcacagccaaagcctggaccgactaatgaatccactcatcgaccaatacttgtactatctctcaaagactattaacggttctggacagggccaacaaacgctaaaattcagtgtggccggacccagcaacatggctgtccagggaagaaactacatacctggacccagctaccgacaacaacgtgtctcaaccactgtgacttttaacaacaacagcgaatttgcttggcctggagcttcttcttgggctctcaatggacgtaatagcttgatgaatcctggacctgctatggccagccacaaagaaggagaggaccgtttctttcctttgtctggatctttaatttttggcaaacaaggaactggaagagacaacgtggatgcggacaaagtcatgataaccaacgaagaagaaattaaaactactaacccggtagcaacggagtcctatggacaagtggccacaaaccaccagagtgcccgggcacaggcgcagaccggctgggttcaaaaccaaggaatacttccgggtatggtttggcaggacagagatgtgtacctgcaaggacccatttgggccaaaattcctcacacggacggcaactttcacccttctccgctgatgggagggtttggaatgaagcacccgcctcctcagatcctcatcaaaaacacacctgtacctgcggatcctccaacggccttcaacaagggcaagctgaactctttcatcacccagtattctactggccaagtcagcgtggagatcgagtgggagctgcagaaggaaaacagcaagcgctggaacccggagatccagtacacttccaactattacaagtctaataatgttgaatttgctgttaatactgaaggtgtatatagtgaaccccgccccattggcaccagatacctgactcgtaatctg

SEQ ID NO: 944 - protein, 736 aa, synthetic construct
  REGION 1..736: note = Adeno Associated Virus Capsid Protein Variant
MAADGYLPDWLEDNLSEGIREWWALKPGAPQPKANQQHQDNARGLVLPGYKYLGPGNGLDKGEPVNAADAAALEHDKAYDQQLKAGDNPYLKYNHADAEPQERLKEDTSFGGNLGRAVFQAKKRLLEPLGLVEEAAKTAPGKKRPVEQSPQEPDSSAGIGKSGAQPAKKRLNFGQTGDTESVPDPQPIGEPPAAPSGVGSLTMASGGGAPVADNNEGADGVGSSSGNWHCDSQWLGDRVITTSTRTWALPTYNNHLYKQISNSTSGGSSNDNAYFGYSTPWGYFDFNRFHCHFSPRDWQRLINNNWGFRPKRLNFKLFNIQVKEVTDNNGVKTIANNLTSTVQVFTDSDYQLPYVLGSAHEGCLPPFPADVFMIPQYGYLTLNDGSQAVGRSSFYCLEYFPSQMLRTGNNFQFSYEFENVPFHSSYAHSQSLDRLMNPLIDQYLYYLSKTINGSGQGQQTLKFSVAGPSNMAVQGRNYIPGPSYRQQRVSTTVTFNNNSEFAWPGASSWALNGRNSLMNPGPAMASHKEGEDRFFPLSGSLIFGKQGTGRDNVDADKVMITNEEEIKTTNPVATESYGQVATNHQSARAQAQTGWVQNQGILPGMVWQDRDVYLQGPIWAKIPHTDGNFHPSPLMGGFGMKHPPPQILIKNTPVPADPPTAFNKGKLNSFITQYSTGQVSVEIEWELQKENSKRWNPEIQYTSNYYKSNNVEFAVNTEGVYSEPRPIGTRYLTRNL

SEQ ID NO: 945 - DNA, 2208 bp, synthetic construct
  misc_feature 1..2208: note = Adeno Associated Virus Capsid Protein Variant
  source 1..2208: mol_type = other DNA
atggctgccgatggttatcttccagattggctcgaggacaaccttagtgaaggaattcgcgagtggtgggctttgaaacctggagcccctcaacccaaggcaaatcaacaacatcaagacaacgctcgaggtcttgtgcttccgggttacaaataccttggacccggcaacggactcgacaagggggagccggtcaacgcagcagacgcggcggccctcgagcacgacaaggcctacgaccagcagctcaaggccggagacaacccgtacctcaagtacaaccacgccgacgccgagttccaggagcggctcaaagaagatacgtcttttgggggcaacctcgggcgagcagtcttccaggccaaaaagaggcttcttgaacctcttggtctggttgaggaagcggctaagacggctcctggaaagaagaggcctgtagagcagtctcctcaggaaccggactcctccgcgggtattggcaaatcgggtgcacagcccgctaaaaagagactcaatttcggtcagactggcgacacagagtcagtcccagaccctcaaccaatcggagaacctcccgcagccccctcaggtgtgggatctcttacaatggcttcaggtggtggcgcaccagtggcagacaataacgaaggtgccgatggagtgggtagttcctcgggaaattggcattgcgattcccaatggctgggggacagagtcatcaccaccagcacccgaacctgggccctgcccacctacaacaatcacctctacaagcaaatctccaacactacatctggaggatcttcaaatgacaacgcctacttcggctacagcaccccctgggggtattttgacttcaacagattccactgccacttctcaccacgtgactggcagcgactcatcaacaacaactggggattccggcctaagcgactcaacttcaagctcttcaacattcaggtcaaagaggttacggacaacaatggagtcaagaccatcgccaataaccttaccagcacggtccaggtcttcacggactcagactatcagctcccgtacgtgctcgggtcggctcacgagggctgcctcccgccgttcccagcggacgttttcatgattcctcagtacgggtatctgacgcttaatgatggaagccaggccgtgggtcgttcgtccttttactgcctggaatatttcccgtcgcaaatgctaagaacgggtaacaacttccagttcagctacgagtttgagaacgtacctttccatagcagctacgctcacagccaaagcctggaccgactaatgaatccactcatcgaccaatacttgtactatctctcaaagactattaacggttctggacagggccaacaaacgctaaaattcagtgtggccggacccagcaacatggctgtccagggaagaaactacatacctggacccagctaccgacaacaacgtgtctcaaccactgtgacttttaacaacaacagcgaatttgcttggcctggagcttcttcttgggctctcaatggacgtaatagcttgatgaatcctggacctgctatggccagccacaaagaaggagaggaccgtttctttcctttgtctggatctttaatttttggcaaacaaggaactggaagagacaacgtggatgcggacaaagtcatgataaccaacgaagaagaaattaaaactactaacccggtagcaacggagtcctatggacaagtggccacaaaccaccagagtgcccgggcacaggcgcagaccggctgggttcaaaaccaaggaatacttccgggtatggtttggcaggacagagatgtgtacctgcaaggacccatttgggccaaaattcctcacacggacggcaactttcacccttctccgctgatgggagggtttggaatgaagcacccgcctcctcagatcctcatcaaaaacacacctgtacctgcggatcctccaacggccttcaacaagggcaagctgaactctttcatcacccagtattctactggccaagtcagcgtggagatcgagtgggagctgcagaaggaaaacagcaagcgctggaacccggagatccagtacacttccaactattacaagtctaataatgttgaatttgctgttaatactgaaggtgtatatagtgaaccccgccccattggcaccagatacctgactcgtaatctg

SEQ ID NO: 946 - protein, 736 aa, synthetic construct
  REGION 1..736: note = Adeno Associated Virus Capsid Protein Variant
MAADGYLPDWLEDNLSEGIREWWALKPGAPQPKANQQHQDNARGLVLPGYKYLGPGNGLDKGEPVNAADAAALEHDKAYDQQLKAGDNPYLKYNHADAEFQERLKEDTSFGGNLGRAVFQAKKRLLEPLGLVEEAAKTAPGKKRPVEQSPQEPDSSAGIGKSGAQPAKKRLNFGQTGDTESVPDPQPIGEPPAAPSGVGSLTMASGGGAPVADNNEGADGVGSSSGNWHCDSQWLGDRVITTSTRTWALPTYNNHLYKQISNTTSGGSSNDNAYFGYSTPWGYFDFNRFHCHFSPRDWQRLINNNWGFRPKRLNFKLFNIQVKEVTDNNGVKTIANNLTSTVQVFTDSDYQLPYVLGSAHEGCLPPFPADVFMIPQYGYLTLNDGSQAVGRSSFYCLEYFPSQMLRTGNNFQFSYEFENVPFHSSYAHSQSLDRLMNPLIDQYLYYLSKTINGSGQGQQTLKFSVAGPSNMAVQGRNYIPGPSYRQQRVSTTVTFNNNSEFAWPGASSWALNGRNSLMNPGPAMASHKEGEDRFFPLSGSLIFGKQGTGRDNVDADKVMITNEEEIKTTNPVATESYGQVATNHQSARAQAQTGWVQNQGILPGMVWQDRDVYLQGPIWAKIPHTDGNFHPSPLMGGFGMKHPPPQILIKNTPVPADPPTAFNKGKLNSFITQYSTGQVSVEIEWELQKENSKRWNPEIQYTSNYYKSNNVEFAVNTEGVYSEPRPIGTRYLTRNL

SEQ ID NO: 947 - DNA, 2208 bp, synthetic construct
  misc_feature 1..2208: note = Adeno Associated Virus Capsid Protein Variant
  source 1..2208: mol_type = other DNA
atggctgccgatggttatcttccagattggctcgaggacaaccttagtgaaggaattcgcgagtggtgggctttgaaacctggagcccctcaacccaaggcaaatcaacaacatcaagacaacgctcgaggtcttgtgcttccgggttacaaataccttggacccggcaacggactcgacaagggggagccggtcaacgcagcagacgcggcggccctcgagcacgacaaggcctacgaccagcagctcaaggccggagacaacccgtacctcaagtacaaccacgccgacgccgagttccaggagcggctcaaagaagatacgtcttttgggggcaacctcgggcgagcagtcttccaggccaaaaagaggcttcttgaacctcttggtctggttgaggaagcggctaagacggctcctggaaagaagaggcctgtagagcagtctcctcaggaaccggactcctccgcgggtattggcaaatcgggtgcacagcccgctaaaaagagactcaatttcggtcagactggcgacacagagtcagtcccagaccctcaaccaatcggagaacctcccgcagccccctcaggtgtgggatctcttacaatggcttcaggtggtggcgcaccagtggcagacaataacgaaggtgccgatggagtgggtagttcctcgggaaattggcattgcgattcccaatggctgggggacagagtcatcaccaccagcacccgaacctgggccctgcccacctacaacaatcacctctacaagcaaatctccaacagcacatctggattgtcttcaaatgacaacgcctacttcggctacagcaccccctgggggtattttgacttcaacagattccactgccacttctcaccacgtgactggcagcgactcatcaacaacaactggggattccggcctaagcgactcaacttcaagctcttcaacattcaggtcaaagaggttacggacaacaatggagtcaagaccatcgccaataaccttaccagcacggtccaggtcttcacggactcagactatcagctcccgtacgtgctcgggtcggctcacgagggctgcctcccgccgttcccagcggacgttttcatgattcctcagtacgggtatctgacgcttaatgatggaagccaggccgtgggtcgttcgtccttttactgcctggaatatttcccgtcgcaaatgctaagaacgggtaacaacttccagttcagctacgagtttgagaacgtacctttccatagcagctacgctcacagccaaagcctggaccgactaatgaatccactcatcgaccaatacttgtactatctctcaaagactattaacggttctggacagggccaacaaacgctaaaattcagtgtggccggacccagcaacatggctgtccagggaagaaactacatacctggacccagctaccgacaacaacgtgtctcaaccactgtgacttttaacaacaacagcgaatttgcttggcctggagcttcttcttgggctctcaatggacgtaatagcttgatgaatcctggacctgctatggccagccacaaagaaggagaggaccgtttctttcctttgtctggatctttaatttttggcaaacaaggaactggaagagacaacgtggatgcggacaaagtcatgataaccaacgaagaagaaattaaaactactaacccggtagcaacggagtcctatggacaagtggccacaaaccaccagagtgcccgggcacaggcgcagaccggctgggttcaaaaccaaggaatacttccgggtatggtttggcaggacagagatgtgtacctgcaaggacccatttgggccaaaattcctcacacggacggcaactttcacccttctccgctgatgggagggtttggaatgaagcacccgcctcctcagatcctcatcaaaaacacacctgtacctgcggatcctccaacggccttcaacaagggcaagctgaactctttcatcacccagtattctactggccaagtcagcgtggagatcgagtgggagctgcagaaggaaaacagcaagcgctggaacccggagatccagtacacttccaactattacaagtctaataatgttgaatttgctgttaatactgaaggtgtatatagtgaaccccgccccattggcaccagatacctgactcgtaatctg

SEQ ID NO: 948 - protein, 736 aa, synthetic construct
  REGION 1..736: note = Adeno Associated Virus Capsid Protein Variant
MAADGYLPDWLEDNLSEGIREWWALKPGAPQPKANQQHQDNARGLVLPGYKYLGPGNGLDKGEPVNAADAAALEHDKAYDQQLKAGDNPYLKYNHADAEFQERLKEDTSFGGNLGRAVFQAKKRLLEPLGLVEEAAKTAPGKKRPVEQSPQEPDSSAGIGKSGAQPAKKRLNFGQTGDTESVPDPQPIGEPPAAPSGVGSLTMASGGGAPVADNNEGADGVGSSSGNWHCDSQWLGDRVITTSTRTWALPTYNNHLYKQISNSTSGLSSNDNAYFGYSTPWGYFDFNRFHCHFSPRDWQRLINNNWGFRPKRLNFKLFNIQVKEVTDNNGVKTIANNLTSTVQVFTDSDYQLPYVLGSAHEGCLPPFPADVFMIPQYGYLTLNDGSQAVGRSSFYCLEYFPSQMLRTGNNFQFSYEFENVPFHSSYAHSQSLDRLMNPLIDQYLYYLSKTINGSGQGQQTLKFSVAGPSNMAVQGRNYIPGPSYRQQRVSTTVTFNNNSEFAWPGASSWALNGRNSLMNPGPAMASHKEGEDRFFPLSGSLIFGKQGTGRDNVDADKVMITNEEEIKTTNPVATESYGQVATNHQSARAQAQTGWVQNQGILPGMVWQDRDVYLQGPIWAKIPHTDGNFHPSPLMGGFGMKHPPPQILIKNTPVPADPPTAFNKGKLNSFITQYSTGQVSVEIEWELQKENSKRWNPEIQYTSNYYKSNNVEFAVNTEGVYSEPRPIGTRYLTRNL

SEQ ID NO: 949 - DNA, 2208 bp, synthetic construct
  misc_feature 1..2208: note = Adeno Associated Virus Capsid Protein Variant
  source 1..2208: mol_type = other DNA
atggctgccgatggttatcttccagattggctcgaggacaaccttagtgaaggaattcgcgagtggtgggctttgaaacctggagcccctcaacccaaggcaaatcaacaacatcaagacaacgctcgaggtcttgtgcttccgggttacaaataccttggacccggcaacggactcgacaagggggagccggtcaacgcagcagacgcggcggccctcgagcacgacaaggcctacgaccagcagctcaaggccggagacaacccgtacctcaagtacaaccacgccgacgccgagttccaggagcggctcaaagaagatacgtcttttgggggcaacctcgggcgagcagtcttccaggccaaaaagaggcttcttgaacctcttggtctggttgaggaagcggctaagacggctcctggaaagaagaggcctgtagagcagtctcctcaggaaccggactcctccgcgggtattggcaaatcgggtgcacagcccgctaaaaagagactcaatttcggtcagactggcgacacagagtcagtcccagaccctcaaccaatcggagaacctcccgcagccccctcaggtgtgggatctcttacaatggcttcaggtggtggcgcaccagtggcagacaataacgaaggtgccgatggagtgggtagttcctcgggaaattggcattgcgattcccaatggctgggggacagagtcatcaccaccagcacccgaacctgggccctgcccacctacaacaatcacctctacaagcaaatctccaacagcacatctggaggatcttcaaatgacaacgcctacttcggctacagcaccccctgggggtattttgacttcaacagattccactgccacttctcaccacgtgactggcagcgactcatcaacaacaactggggattccggcctaagcgactcaacttcaagctcttcaacattcaggtcaaagaggttacggacaacaatggagtcaagaccatcgccaataaccttaccagcacggtccaggtcttcacggactcagactatcagctcccgtacgtgctcgggtcggctcacgagggctgcctcccgccgttcccagcggacgttttcatgattcctcagtacgggtatctgacgcttaatgatggaagccaggccgtgggtcgttcgtccttttactgcctggaatatttcccgtcgcaaatgctaagaacgggtaacaacttccagttcagctacgagttcgagaacgtacctttccatagcagctacgctcacagccaaagcctggaccgactaatgaatccactcatcgaccaatacttgtactatctctcaaagactattaacggttctggacagggccaacaaacgctaaaattcagtaatgccggacccagcaacatggctgtccagggaagaaactacatacctggacccagctaccgacaacaacgtgtctcaaccactgtgacttttaacaacaacagcgaatttgcttggcctggagcttcttcttgggctctcaatggacgtaatagcttgatgaatcctggacctgctatggccagccacaaagaaggagaggaccgtttctttcctttgtctggatctttaatttttggcaaacaaggaactggaagagacaacgtggatgcggacaaagtcatgataaccaacgaagaagaaattaaaactactaacccggtagcaacggagtcctatggacaagtggccacaaaccaccagagtgcccgggcacaggcgcagaccggctgggttcaaaaccaaggaatacttccgggtatggtttggcaggacagagatgtgtacctgcaaggacccatttgggccaaaattcctcacacggacggcaactttcacccttctccgctgatgggagggtttggaatgaagcacccgcctcctcagatcctcatcaaaaacacacctgtacctgcggatcctccaacggccttcaacaagggcaagctgaactctttcatcacccagtattctactggccaagtcagcgtggagatcgagtgggagctgcagaaggaaaacagcaagcgctggaacccggagatccagtacacttccaactattacaagtctaataatgttgaatttgctgttaatactgaaggtgtatatagtgaaccccgccccattggcaccagatacctgactcgtaatctg

SEQ ID NO: 950 - protein, 736 aa, synthetic construct
  REGION 1..736: note = Adeno Associated Virus Capsid Protein Variant
MAADGYLPDWLEDNLSEGIREWWALKPGAPQPKANQQHQDNARGLVLPGYKYLGPGNGLDKGEPVNAADAAALEHDKAYDQQLKAGDNPYLKYNHADAEFQERLKEDTSFGGNLGRAVFQAKKRLLEPLGLVEEAAKTAPGKKRPVEQSPQEPDSSAGIGKSGAQPAKKRLNFGQTGDTESVPDPQPIGEPPAAPSGVGSLTMASGGGAPVADNNEGADGVGSSSGNWHCDSQWLGDRVITTSTRTWALPTYNNHLYKQISNSTSGGSSNDNAYFGYSTPWGYFDFNRFHCHFSPRDWQRLINNNWGFRPKRLNFKLFNIQVKEVTDNNGVKTIANNLTSTVQVFTDSDYQLPYVLGSAHEGCLPPFPADVFMIPQYGYLTLNDGSQAVGRSSFYCLEYFPSQMLRTGNNFQFSYEFENVPFHSSYAHSQSLDRLMNPLIDQYLYYLSKTINGSGQGQQTLKFSNAGPSNMAVQGRNYIPGPSYRQQRVSTTVTFNNNSEFAWPGASSWALNGRNSLMNPGPAMASHKEGEDRFFPLSGSLIFGKQGTGRDNVDADKVMITNEEEIKTTNPVATESYGQVATNHQSARAQAQTGWVQNQGILPGMVWQDRDVYLQGPIWAKIPHTDGNFHPSPLMGGFGMKHPPPQILIKNTPVPADPPTAFNKGKLNSFITQYSTGQVSVEIEWELQKENSKRWNPEIQYTSNYYKSNNVEFAVNTEGVYSEPRPIGTRYLTRNL

SEQ ID NO: 951 - DNA, 2208 bp, synthetic construct
  misc_feature 1..2208: note = Adeno Associated Virus Capsid Protein Variant
  source 1..2208: mol_type = other DNA
atggctgccgatggttatcttccagattggctcgaggacaaccttagtgaaggaattcgcgagtggtgggctttgaaacctggagcccctcaacccaaggcaaatcaacaacatcaagacaacgctcgaggtcttgtgcttccgggttacaaataccttggacccggcaacggactcgacaagggggagccggtcaacgcagcagacgcggcggccctcgagcacgacaaggcctacgaccagcagctcaaggccggagacaacccgtacctcaagtacaaccacgccgacgccgagttccaggagcggctcaaagaagatacgtcttttgggggcaacctcgggcgagcagtcttccaggccaaaaagaggcttcttgaacctcttggtctggttgaggaagcggctaagacggctcctggaaagaagaggcctgtagagcagtctcctcaggaaccggactcctccgcgggtattggcaaatcgggtgcacagcccgctaaaaagagactcaatttcggtcagactggcgacacagagtcagtcccagaccctcaaccaatcggagaacctcccgcagccccctcaggtgtgggatctcttacaatggcttcaggtggtggcgcaccagtggcagacaataacgaaggtgccgatggagtgggtagttcctcgggaaattggcattgcgattcccaatggctgggggacagagtcatcaccaccagcacccgaacctgggccctgcccacctacaacaatcacctctacaagcaaatctccaacagcacatctggaggatcttcaaatgacaacgcctactttggctacagcaccccctgggggtattttgacttcaacagattccactgccacttctcaccacgtgactggcagcgactcatcaacaacaactggggattccggcctaagcgactcaacttcaagctcttcaacattcaggtcaaagaggttacggacaacaatggagtcaagaccatcgccaataaccttaccagcacggtccaggtcttcacggactcagactatcagctcccgtacgtgctcgggtcggctcacgagggctgcctcccgccgttcccagcggacgttttcatgattcctcagtacgggtatctgacgcttaatgatggaagccaggccgtgggtcgttcgtccttttactgcctggaatatttcccgtcgcaaatgctaagaacgggtaacaacttccagttcagctacgagtttgagaacgtacctttccatagcagctacgctcacagccaaagcctggaccgactaatgaatccactcatcgaccaatacttgtactatctctcaaagactattaacggttctggacagggccaacaaacgctaaaattcagtgtggccggacccagcaacatggctgtccagggaagaaactacatacctggacccagctaccgacaacaacgtgtctcaaccactgtgacttttaacaacaacagcgaatttgcttggcctggagcttcttcttgggctctcaatggacgtaatagcttgatgaatcctggacctgctatggccagccacaaagaaggagaggaccgtttctttcctttgtctggatctttaatttttggcaaacaaggaactggaagagacaacgtggatgcggacaaagtcatgataaccaacgaagaagaaattaaaactactaacccggtagcaacggagtcctatggacaagtggccacaaaccaccagagtgcccgggcacaggcgcagaccggctgggttcaaaaccaaggaatacttccgggtatggtttggcaggacagagatgtgtacctgcaaggacccatttgggccaaaattcctcacacggacggcaactttcacccttctccgctgatgggagggtttggaatgaagcacccgcctcctcagatcctcatcaaaaacacacctgtacctgcggatcctccaacggccttcaacaagggcaagctgaactctttcatcacccagtattctactggccaagtcagcgtggagatcgagtgggagctgcagaaggaaaacagcaagcgctggaacccggagatccagtacacttccaactattacaagtctaataatgttgaatttgctgttaatactgaaggtgtatatagtgaaccccgccccattggcaccagatacctgactcgtaatctg

SEQ ID NO: 952 - protein, 736 aa, synthetic construct; identical to SEQ ID NO: 552
  REGION 1..736: note = Adeno Associated Virus Capsid Protein Variant

SEQ ID NO: 953 - DNA, 2208 bp, synthetic construct
  misc_feature 1..2208: note = Adeno Associated Virus Capsid Protein Variant
  source 1..2208: mol_type = other DNA
atggctgccgatggttatcttccagattggctcgaggacaaccttagtgaaggaattcgcgagtggtgggctttgaaacctggagcccctcaacccaaggcaaatcaacaacatcaagacaacgctcgaggtcttgtgcttccgggttacaaataccttggacccggcaacggactcgacaagggggagccggtcaacgcagcagacgcggcggccctcgagcacgacaaggcctacgaccagcagctcaaggccggagacaacccgtacctcaagtacaaccacgccgacgccgagttccaggagcggctcaaagaagatacgtcttttgggggcaacctcgggcgagcagtcttccaggccaaaaagaggcttcttgaacctcttggtctggttgaggaagcggctaagacggctcctggaaagaagaggcctgtagagcagtctcctcaggaaccggactcctccgcgggtattggcaaatcgggtgcacagcccgctaaaaagagactcaatttcggtcagactggcgacacagagtcagtcccagaccctcaaccaatcggagaacctcccgcagccccctcaggtgtgggatctcttacaatggcttcaggtggtggcgcatcagtggcagacaataacgaaggtgccgatggagtgggtagttcctcgggaaattggcattgcgattcccaatggctgggggacagagtcatcaccaccagcacccgaacctgggccctgcccacctacaacaatcacctctacaagcaaatctccaacagcacatctttcggatcttcaaatgacaacgcctacttcggctacagcaccccctgggggtattttgacttcaacagattccactgccacttctcaccacgtgactggcagcgactcatcaacaacaactggggattccggcctaagcgactcaacttcaagctcttcaacattcaggtcaaagaggttacggacaacaatggagtcaagaccatcgccaataaccttaccagcacggtccaggtcttcacggactcagactatcagctcccgtacgtgctcgggtcggctcacgagggctgcctcccgccgttcccagcggacgttttcatgattcctcagtacgggtatctgacgcttaatgatggaagccaggccgtgggtcgttcgtccttttactgcctggaatatttcccgtcgcaaatgctaagaacgggtaacaacttccagttcagctacgagtttgagaacgtacctttccatagcagctacgctcacagccaaagcctggaccgactaatgaatccactcatcgaccaatacttgtactatctctcaaagactattaacggttctggacagggccaacaaacgctaaaattcagtgtggccggacccagcaacatggctgtccagggaagaaactacatacctggacccagctaccgacaacaacgtgtctcaaccactgtgacttttaacaacaacagcgaatttgcttggcctggagcttcttcttgggctctcaatggacgtaatagcttgatgaatcctggacctgctatggccagccacaaagaaggagaggaccgtttctttcctttgtctggatctttaatttttggcaaacaaggaactggaagagacaacgtggatgcggacaaagtcatgataaccaacgaagaagaaattaaaactactaacccggtagcaacggagtcctatggacaagtggccacaaaccaccagagtgcccgggcacaggcgcagaccggctgggttcaaaaccaaggaatacttccgggtatggtttggcaggacagagatgtgtacctgcaaggacccatttgggccaaaattcctcacacggacggcaactttcacccttctccgctgatgggagggtttggaatgaagcacccgcctcctcagatcctcatcaaaaacacacctgtacctgcggatcctccaacggccttcaacaagggcaagctgaactctttcatcacccagtattctactggccaagtcagcgtggagatcgagtgggagctgcagaaggaaaacagcaagcgctggaacccggagatccagtacacttccaactattacaagtctaataatgttgaatttgctgttaatactgaaggtgtatatagtgaaccccgccccattggcaccagatacctgactcgtaatctg

SEQ ID NO: 954 - protein, 736 aa, synthetic construct
  REGION 1..736: note = Adeno Associated Virus Capsid Protein Variant
MAADGYLPDWLEDNLSEGIREWWALKPGAPQPKANQQHQDNARGLVLPGYKYLGPGNGLDKGEPVNAADAAALEHDKAYDQQLKAGDNPYLKYNHADAEFQERLKEDTSFGGNLGRAVFQAKKRLLEPLGLVEEAAKTAPGKKRPVEQSPQEPDSSAGIGKSGAQPAKKRLNFGQTGDTESVPDPQPIGEPPAAPSGVGSLTMASGGGASVADNNEGADGVGSSSGNWHCDSQWLGDRVITTSTRTWALPTYNNHLYKQISNSTSFGSSNDNAYFGYSTPWGYFDFNRFHCHFSPRDWQRLINNNWGFRPKRLNFKLFNIQVKEVTDNNGVKTIANNLTSTVQVFTDSDYQLPYVLGSAHEGCLPPFPADVFMIPQYGYLTLNDGSQAVGRSSFYCLEYFPSQMLRTGNNFQFSYEFENVPFHSSYAHSQSLDRLMNPLIDQYLYYLSKTINGSGQGQQTLKFSVAGPSNMAVQGRNYIPGPSYRQQRVSTTVTFNNNSEFAWPGASSWALNGRNSLMNPGPAMASHKEGEDRFFPLSGSLIFGKQGTGRDNVDADKVMITNEEEIKTTNPVATESYGQVATNHQSARAQAQTGWVQNQGILPGMVWQDRDVYLQGPIWAKIPHTDGNFHPSPLMGGFGMKHPPPQILIKNTPVPADPPTAFNKGKLNSFITQYSTGQVSVEIEWELQKENSKRWNPEIQYTSNYYKSNNVEFAVNTEGVYSEPRPIGTRYLTRNL

SEQ ID NO: 955 - DNA, 2208 bp, synthetic construct
  misc_feature 1..2208: note = Adeno Associated Virus Capsid Protein Variant
  source 1..2208: mol_type = other DNA
atggctgccgatggttatcttccagattggctcgaggacaaccttagtgaaggaattcgcgagtggtgggctttgaaacctggagcccctcaacccaaggcaaatcaacaacatcaagacaacgctcgaggtcttgtgcttccgggttacaaataccttggacccggcaacggactcgacaagggggagccggtcaacgcagcagacgcggcggccctcgagcacgacaaggcctacgaccagcagctcaaggccggagacaacccgtacctcaagtacaaccacgccgacgccgagttccaggagcggctcaaagaagatacgtcttttgggggcaacctcgggcgagcagtcttccaggccaaaaagaggcttcttgaacctcttggtctggttgaggaagcggctaagacggctcctggaaagaagaggcctgtagagcagtctcctcaggaaccggactcctccgcgggtattggcaaatcgggtgcacagcccgctaaaaagagactcaatttcggtcagactggcgacacagagtcagtcccagaccctcaaccaatcggagaacctcccgcagccccctcaggtgtgggatctcttacaatggcttcaggtggtggcgcaccagtggcagacaataacgaaggtgccgatggagtgggtagttcctcgggaaattggcattgcgattcccaatggctgggggacagagtcatcaccaccagcacccgaacctgggccctgcccacctacaacaatcacctctacaagcaaatctccaacagcacatctggaggatcttcaaatgacaacgcctacttcggctacagcaccccctgggggtattttgacttcaacagattccactgccacttctcaccacgtgactggcagcgactcatcaacaacaactggggattccggcctaagcgactcaacttcaagctcttcaacattcaggtcaaagaggttacggacaacaatggagtcaagaccatcgccaataaccttaccagcacggtccaggtcttcacggactcagactatcagctcccgtacgtgctcgggtcggctcacgagggctgcctcccgccgttcccagcggacgttttcatgattcctcagtacgggtatctgacgcttaatgatggaagccaggccgtgggtcgttcgtccttttactgcctggaatatttcccgtcgcaaatgctaagaacgggtaacaacttccagttcagctacgagtttgagaacgtacctttccatagcagctacgctcacagccaaagcctggaccgactaatgaatccactcatcgaccaatacttgtactatctctcaaagactggtaacggttctggacagggccaacaaacgctaaaattcagtgtggccggacccagcaacatggctgtccagggaagaaactacatacctggacccagctaccgacaacaacgtgtctcaaccactgtgacttttaacaacaacagcgaatttgcttggcctggagcttcttcttgggctctcaatggacgtaatagcttgatgaatcctggacctgctatggccagccacaaagaaggagaggaccgtttctttcctttgtctggatctttaatttttggcaaacaaggaactggaagagacaacgtggatgcggacaaagtcatgataaccaacgaagaagaaattaaaactactaacccggtagcaacggagtcctatggacaagtggccacaaaccaccagagtgcccgggcacaggcgcagaccggctgggttcaaaaccaaggaatacttccgggtatggtttggcaggacagagatgtgtacctgcaaggacccatttgggccaaaattcctcacacggacggcaactttcacccttctccgctgatgggagggtttggaatgaagcacccgcctcctcagatcctcatcaaaaacacacctgtacctgcggatcctccaacggccttcaacaagggcaagctgaactctttcatcacccagtattctactggccaagtcagcgtggagatcgagtgggagctgcagaaggaaaacagcaagcgctggaacccggagatccagtacacttccaactattacaagtctaataatgttgaatttgctgttaatactgaaggtgtatatagtgaaccccgccccattggcaccagatacctgactcgtaatctg

SEQ ID NO: 956 - protein, 736 aa, synthetic construct
  REGION 1..736: note = Adeno Associated Virus Capsid Protein Variant
MAADGYLPDWLEDNLSEGIREWWALKPGAPQPKANQQHQDNARGLVLPGYKYLGPGNGLDKGEPVNAADAAALEHDKAYDQQLKAGDNPYLKYNHADAEFQERLKEDTSFGGNLGRAVFQAKKRLLEPLGLVEEAAKTAPGKKRPVEQSPQEPDSSAGIGKSGAQPAKKRLNFGQTGDTESVPDPQPIGEPPAAPSGVGSLTMASGGGAPVADNNEGADGVGSSSGNWHCDSQWLGDRVITTSTRTWALPTYNNHLYKQISNSTSGGSSNDNAYFGYSTPWGYFDFNRFHCHFSPRDWQRLINNNWGFRPKRLNFKLFNIQVKEVTDNNGVKTIANNLTSTVQVFTDSDYQLPYVLGSAHEGCLPPFPADVFMIPQYGYLTLNDGSQAVGRSSFYCLEYFPSQMLRTGNNFQFSYEFENVPFHSSYAHSQSLDRLMNPLIDQYLYYLSKTGNGSGQGQQTLKFSVAGPSNMAVQGRNYIPGPSYRQQRVSTTVTFNNNSEFAWPGASSWALNGRNSLMNPGPAMASHKEGEDRFFPLSGSLIFGKQGTGRDNVDADKVMITNEEEIKTTNPVATESYGQVATNHQSARAQAQTGWVQNQGILPGMVWQDRDVYLQGPIWAKIPHTDGNFHPSPLMGGFGMKHPPPQILIKNTPVPADPPTAFNKGKLNSFITQYSTGQVSVEIEWELQKENSKRWNPEIQYTSNYYKSNNVEFAVNTEGVYSEPRPIGTRYLTRNL

SEQ ID NO: 957 - DNA, 2208 bp, synthetic construct
  misc_feature 1..2208: note = Adeno Associated Virus Capsid Protein Variant
  source 1..2208: mol_type = other DNA
atggctgccgatggttatcttccagattggctcgaggacaaccttagtgaaggaattcgcgagtggtgggctttgaaacctggagcccctcaacccaaggcaaatcaacaacatcaagacaacgctcgaggtcttgtgcttccgggttacaaataccttggacccggcaacggactcgacaagggggagccggtcaacgcagcagacgcggcggccctcgagcacgacaaggcctacgaccagcagctcaaggccggagacaacccgtacctcaagtacaaccacgccgacgccgagttccaggagcggctcaaagaagatacgtcttttgggggcaacctcgggcgagcagtcttccaggccaaaaagaggcttcttgaacctcttggtctggttgaggaagcggctaagacggctcctggaaagaagaggcctgtagagcagtctcctcaggaaccggactcctccgcgggtattggcaaatcgggtgcacagcccgctaaaaagagactcaatttcggtcagactggcgacacagagtcagtcccagaccctcaaccaatcggagaacctcccgcagccccctcaggtgtgggatctcttacaatggcttcaggtggtggcgcaccagtggcagacaataacgaaggtgccgatggagtgggtagttcctcgggaaattggcattgcgattcccaatggctgggggacagagtcatcaccaccagcacccgaacctgggccctgcccacctacaacaatcacctctacaagcaaatctccaacagcacatctggaggttcttcaaatgacaacgcctacttcggctacagcaccccctgggggtattttgacttcaacagattccactgccacttctcaccacgtgactggcagcgactcatcaacaacaactggggattccggcctaagcgactcaacttcaagctcttcaacattcaggtcaaagaggttacggacaacaatggagtcaagaccatcgccaataaccttaccagcacggtccaggtcttcacggactcagactatcagctcccgtacgtgctcgggtcggctcacgagggctgcctcccgccgttcccagcggacgttttcatgattcctcagtacgggtatctgacgcttaatgatggaagccaggccgtgggtcgttcgtccttttactgcctggaatatttcccgtcgcaaatgctaagaacgggtaacaacttccagttcagctacgagtttgagaacgtacctttccatagcagctacgctcacagccaaagcctggaccgactaatgaatccactcatcgaccaatacttgtactatctctcaaagactattaacggttctggacagggccaacaaacgctaaaattcagtgtggccggacccagcaacatggctgtccagggaagaaactacatacctggacccagctaccgacaacaacgtgtctcaaccactgtgacttttaacaacaacagcgaatttgcttggcctggagcttcttcttgggctctcaatggacgtaatagcttgatgaatcctggacctgctatggccagccacaaagaaggagaggaccgtttctttcctttgtctggatctttaatttttggcaaacaaggaactggaagagacaacgtggatgcggacaaagtcatgataaccaacgaagaagaaattaaaactactaacccggtagcaacggagtcctatggacaagtggccacaaaccaccagagtgcccgggcacaggcgcagaccggctgggttcaaaaccaaggaatacttccgggtatggtttggcaggacagagatgtgtacctgcaaggacccatttgggccaaaattcctcacacggacggcaactttcacccttctccgctgatgggagggtttggaatgaagcacccgcctcctcagatcctcatcaaaaacacacctgtacctgcggatcctccaacggccttcaacaagggcaagctgaactctttcatcacccagtattctactggccaagtcagcgtggagatcgagtgggagctgcagaaggaaaacagcaagcgctggaacccggagatccagtacacttccaactattacaagtctaataatgttgaatttgctgttaatactgaaggtgtatatagtgaaccccgccccattggcaccagatacctgactcgtaatctg

SEQ ID NO: 958 - protein, 736 aa, synthetic construct; identical to SEQ ID NO: 552
  REGION 1..736: note = Adeno Associated Virus Capsid Protein Variant

SEQ ID NO: 959 - DNA, 2208 bp, synthetic construct
  misc_feature 1..2208: note = Adeno Associated Virus Capsid Protein Variant
  source 1..2208: mol_type = other DNA
atggctgccgatggttatcttccagattggctcgaggacaaccttagtgaaggaattcgcgagtggtgggctttgaaacctggagcccctcaacccaaggcaaatcaacaacatcaagacaacgctcgaggtcttgtgcttccgggttacaaataccttggacccggcaacggactcaagaagggggagccggtcaacgcagcagacgcggcggccctcgagcacgacaaggcctacgaccagcagctcaaggccggagacaacccgtacctcaagtacaaccacgccgacgccgagttccaggagcggctcaaagaagatacgtcttttgggggcaacctcgggcgagcagtcttccaggccaaaaagaggcttcttgaacctcttggtctggttgaggaagcggctaagacggctcctggaaagaagaggcctgtagagcagtctcctcaggaaccggactcctccgcgggtattggcaaatcgggtgcacagcccgctaaaaagagactcaatttcggtcagactggcgacacagagtcagtcccagaccctcaaccaatcggagaacctcccgcagccccctcaggtgtgggatctcttacaatggcttcaggtggtggcgcaccagtggcagacaataacgaaggtgccgatggagtgggtagttcctcgggaaattggcattgcgattcccaatggctgggggacagagtcatcaccaccagcacccgaacctgggccctgcccacctacaacaatcacctctacaagcaaatctccaacagcacatctggaggatcttcaaatgacaacgcctacttcggctacagcaccccctgggggtattttgacttcaacagattccactgccacttctcaccacgtgactggcagcgactcatcaacaacaactggggattccggcctaagcgactcaacttcaagctcttcaacattcaggtcaaagaggttacggacaacaatggagtcaagaccatcgccaataaccttaccagcacggtccaggtcttcacggactcagactatcagctcccgtacgtgctcgggtcggctcacgagggctgcctcccgccgttcccagcggacgttttcatgattcctcagtacgggtatctgacgcttaatgatggaagccaggccgtgggtcgttcgtccttttactgcctggaatatttcccgtcgcaaatgctaagaacgggtaacaacttccagttcagctacgagtttgagaacgtacctttccatagcagctacgctcacagccaaagcctggaccgactaatgaatccactcatcgaccaatacttgtactatctctcaaagactattaacggttctggacagggccaacaaacgctaaaattcagtgtggccggacccagcaacatggctgtccagggaagaaactacatacctggacccagctaccgacaacaacgtgtctcaaccactgtgacttttaacaacaacagcgaatttgcttggcctggagcttcttcttgggctctcaatggacgtaatagcttgatgaatcctggacctgctatggccagccacaaagaaggagaggaccgtttctttcctttgtctggatctttaatttttggcaaacaaggaactggaagagacaacgtggatgcggacaaagtcatgataaccaacgaagaagaaattaaaactactaacccggtagcaacggagtcctatggacaagtggccacaaaccaccagagtgcccgggcacaggcgcagaccggctgggttcaaaaccaaggaatacttccgggtatggtttggcaggacagagatgtgtacctgcaaggacccatttgggccaaaattcctcacacggacggcaactttcacccttctccgctgatgggagggtttggaatgaagcacccgcctcctcagatcctcatcaaaaacacacctgtacctgcggatcctccaacggccttcaacaagggcaagctgaactctttcatcacccagtattctactggccaagtcagcgtggagatcgagtgggagctgcagaaggaaaacagcaagcgctggaacccggagatccagtacacttccaactattacaagtctaataatgttgaatttgctgttaatactgaaggtgtatatagtgaaccccgccccattggcaccagatacctgactcgtaatctg

SEQ ID NO: 960 - protein, 736 aa, synthetic construct
  REGION 1..736: note = Adeno Associated Virus Capsid Protein Variant
MAADGYLPDWLEDNLSEGIREWWALKPGAPQPKANQQHQDNARGLVLPGYKYLGPGNGLKKGEPVNAADAAALEHDKAYDQQLKAGDNPYLKYNHADAEFQERLKEDTSFGGNLGRAVFQAKKRLLEPLGLVEEAAKTAPGKKRPVEQSPQEPDSSAGIGKSGAQPAKKRLNFGQTGDTESVPDPQPIGEPPAAPSGVGSLTMASGGGAPVADNNEGADGVGSSSGNWHCDSQWLGDRVITTSTRTWALPTYNNHLYKQISNSTSGGSSNDNAYFGYSTPWGYFDFNRFHCHFSPRDWQRLINNNWGFRPKRLNFKLFNIQVKEVTDNNGVKTIANNLTSTVQVFTDSDYQLPYVLGSAHEGCLPPFPADVFMIPQYGYLTLNDGSQAVGRSSFYCLEYFPSQMLRTGNNFQFSYEFENVPFHSSYAHSQSLDRLMNPLIDQYLYYLSKTINGSGQGQQTLKFSVAGPSNMAVQGRNYIPGPSYRQQRVSTTVTFNNNSEFAWPGASSWALNGRNSLMNPGPAMASHKEGEDRFFPLSGSLIFGKQGTGRDNVDADKVMITNEEEIKTTNPVATESYGQVATNHQSARAQAQTGWVQNQGILPGMVWQDRDVYLQGPIWAKIPHTDGNFHPSPLMGGFGMKHPPPQILIKNTPVPADPPTAFNKGKLNSFITQYSTGQVSVEIEWELQKENSKRWNPEIQYTSNYYKSNNVEFAVNTEGVYSEPRPIGTRYLTRNL

SEQ ID NO: 961 - DNA, 2208 bp, synthetic construct
  misc_feature 1..2208: note = Adeno Associated Virus Capsid Protein Variant
  source 1..2208: mol_type = other DNA
atggctgccgatggttatcttccagattggctcgaggacaaccttagtgaaggaattcgcgagtggtgggctttgaaacctggagcccctcaacccaaggcaaatcaacaacatcaagacaacgctcgaggtcttgtgcttccgggttacaaataccttggacccggcaacggactcgacaagggggagccggtcaacgcagcagacgcggcggccctcgagcacgacaaggcctacgaccagcagctcaaggccggagacaacccgtacctcaagtacaaccacgccgacgccgagttccaggagcggctcaaagaagatacgtcttttgggggcaacctcgggcgagcagtcttccaggccaaaaagaggcttcttgaacctcttggtctggttgaggaagcggctaagacggctcctggaaagaagaggcctgtagagcagtctcctcaggaaccggactcctccgcgggtattggcaaatcgggtgcacagcccgctaaaaagagactcaatttcggtcagactggcgacacagagtcagtcccagaccctcaaccaatcggagaacctcccgcagccccctcaggtgtgggatctcttacaatggcttcaggtggtggcgcaccagtggcagacaataacgaaggtgccgatggagtgggtagttcctcgggaaattggcattgcgattcccaatggctgggggacagagtcatcaccaccagcacccgaacctgggccctgcccacctacaacaatcacctctacaagaagatctccaacagcacatctggaggatcttcaaatgacaacgcctacttcggctacagcaccccctgggggtattttgacttcaacagattccactgccacttctcaccacgtgactggcagcgactcatcaacaacaactggggattccggcctaagcgactcaacttcaagctcttcaacattcaggtcaaagaggttacggacaacaatggagtcaagaccatcgccaataaccttaccagcacggtccaggtcttcacggactcagactatcagctcccgtacgtgctcgggtcggctcacgagggctgcctcccgccgttcccagcggacgttttcatgattcctcagtacgggtatctgacgcttaatgatggaagccaggccgtgggtcgttcgtccttttactgcctggaatatttcccgtcgcaaatgctaagaacgggtaacaacttccagttcagctacgagtttgagaacgtacctttccatagcagctacgctcacagccaaagcctggaccgactaatgaatccactcatcgaccaatacttgtactatctctcaaagactattaacggttctggacagggccaacaaacgctaaaattcagtgtggccggacccagcaacatggctgtccagggaagaaactacatacctggacccagctaccgacaacaacgtgtctcaaccactgtgacttttaacaacaacagcgaatttgcttggcctggagcttcttcttgggctctcaatggacgtaatagcttgatgaatcctggacctgctatggccagccacaaagaaggagaggaccgtttctttcctttgtctggatctttaatttttggcaaacaaggaactggaagagacaacgtggatgcggacaaagtcatgataaccaacgaagaagaaattaaaactactaacccggtagcaacggagtcctatggacaagtggccacaaaccaccagagtgcccgggcacaggcgcagaccggctgggttcaaaaccaaggaatacttccgggtatggtttggcaggacagagatgtgtacctgcaaggacccatttgggccaaaattcctcacacggacggcaactttcacccttctccgctgatgggagggtttggaatgaagcacccgcctcctcagatcctcatcaaaaacacacctgtacctgcggatcctccaacggccttcaacaagggcaagctgaactctttcatcacccagtattctactggccaagtcagcgtggagatcgagtgggagctgcagaaggaaaacagcaagcgctggaacccggagatccagtacacttccaactattacaagtctaataatgttgaatttgctgttaatactgaaggtgtatatagtgaaccccgccccattggcaccagatacctgactcgtaatctg

SEQ ID NO: 962 - protein, 736 aa, synthetic construct
  REGION 1..736: note = Adeno Associated Virus Capsid Protein Variant
MAADGYLPDWLEDNLSEGIREWWALKPGAPQPKANQQHQDNARGLVLPGYKYLGPGNGLDKGEPVNAADAAALEHDKAYDQQLKAGDNPYLKYNHADAEFQERLKEDTSFGGNLGRAVFQAKKRLLEPLGLVEEAAKTAPGKKRPVEQSPQEPDSSAGIGKSGAQPAKKRLNFGQTGDTESVPDPQPIGEPPAAPSGVGSLTMASGGGAPVADNNEGADGVGSSSGNWHCDSQWLGDRVITTSTRTWALPTYNNHLYKKISNSTSGGSSNDNAYFGYSTPWGYFDFNRFHCHFSPRDWQRLINNNWGFRPKRLNFKLFNIQVKEVTDNNGVKTIANNLTSTVQVFTDSDYQLPYVLGSAHEGCLPPFPADVFMIPQYGYLTLNDGSQAVGRSSFYCLEYFPSQMLRTGNNFQFSYEFENVPFHSSYAHSQSLDRLMNPLIDQYLYYLSKTINGSGQGQQTLKFSVAGPSNMAVQGRNYIPGPSYRQQRVSTTVTFNNNSEFAWPGASSWALNGRNSLMNPGPAMASHKEGEDRFFPLSGSLIFGKQGTGRDNVDADKVMITNEEEIKTTNPVATESYGQVATNHQSARAQAQTGWVQNQGILPGMVWQDRDVYLQGPIWAKIPHTDGNFHPSPLMGGFGMKHPPPQILIKNTPVPADPPTAFNKGKLNSFITQYSTGQVSVEIEWELQKENSKRWNPEIQYTSNYYKSNNVEFAVNTEGVYSEPRPIGTRYLTRNL

SEQ ID NO: 963 - DNA, 2208 bp, synthetic construct
  misc_feature 1..2208: note = Adeno Associated Virus Capsid Protein Variant
  source 1..2208: mol_type = other DNA
atggctgccgatggttatcttccagattggctcgaggacaaccttagtgaaggaattcgcgagtggtgggctttgaaacctggagcccctcaacccaaggcaaatcaacaacatcaagacaacgctcgaggtcttgtgcttccgggttacaaataccttggacccggcaacggactcgacaagggggagccggtcaacgcagcagacgcggcggccctcgagcacgacaaggcctacgaccagcagctcaaggccggagacaacccgtacctcaagtacaaccacgccgacgccgagttccaggagcggctcaaagaagatacgtcttttgggggcaacctcgggcgagcagtcttccaggccaaaaagaggcttcttgaacctcttggtctggttgaggaagcggctaagacggctcctggaaagaagaggcctgtagagcagtctcctcaggaaccggactcctccgcgggtattggcaaatcgggtgcacagcccgctaaaaagagactcaatttcggtcagactggcgacacagagtcagtcccagaccctcaaccaatcggagaacctcccgcagccccctcaggtgtgggatctcttacaatggcttcaggtggtggcgcaccagtggcagacaataacgaaggtgccgatggagtgggtagttcctcgggaaattggcattgcgattcccaatggctgggggacagagtcatcaccaccagcacccgaacctgggccctgcccacctacaacaatcacctctacaagcaaatctccaacagcacatctggaggatcttcaaatgacaacgcctacttcggctacagcaccccctgggggtattttgacttcaacagattccactgccacttctcaccacgtgactggcagcgactcatcaacaacaactggggattccggcctaagcgactcaacttcaagctcttcaacattcaggtcaaagaggttacggacaacaatggagtcaagaccatcgccaataaccttaccagcacggtccaggtcttcacggactcagactatcagctcccgtacgtgctcgggtcggctcacgagggctgcctcccgccgttcccagcggacgttttcatgattcctcagtacgggtatctgacgcttaatgatggaagccaggccgtgggtcgttcgtccttttactgcctggaatatttcccgtcgcaaatgctaagaacgggtaacaacttccagttcagctacgagtttgagaacgtacctttccatagcagctacgctcacagccaaagcctggaccgactaatgaatccactcatcgaccaatacttgtactatctctcaaagactcataacggttctggacagggccaacaaacgctaaaattcagtgtggccggacccagcaacatggctgtccagggaagaaactacatacctggacccagctaccgacaacaacgtgtctcaaccactgtgacttttaacaacaacagcgaatttgcttggcctggagcttcttcttgggctctcaatggacgtaatagcttgatgaatcctggacctgctatggccagccacaaagaaggagaggaccgtttctttcctttgtctggatctttaatttttggcaaacaaggaactggaagagacaacgtggatgcggacaaagtcatgataaccaacgaagaagaaattaaaactactaacccggtagcaacggagtcctatggacaagtggccacaaaccaccagagtgcccgggcacaggcgcagaccggctgggttcaaaaccaaggaatacttccgggtatggtttggcaggacagagatgtgtacctgcaaggacccatttgggccaaaattcctcacacggacggcaactttcacccttctccgctgatgggagggtttggaatgaagcacccgcctcctcagatcctcatcaaaaacacacctgtacctgcggatcctccaacggccttcaacaagggcaagctgaactctttcatcacccagtattctactggccaagtcagcgtggagatcgagtgggagctgcagaaggaaaacagcaagcgctggaacccggagatccagtacacttccaactattacaagtctaataatgttgaatttgctgttaatactgaaggtgtatatagtgaaccccgccccattggcaccagatacctgactcgtaatctg

SEQ ID NO: 964 - protein, 736 aa, synthetic construct
  REGION 1..736: note = Adeno Associated Virus Capsid Protein Variant
MAADGYLPDWLEDNLSEGIREWWALKPGAPQPKANQQHQDNARGLVLPGYKYLGPGNGLDKGEPVNAADAAALEHDKAYDQQLKAGDNPYLKYNHADAEFQERLKEDTSFGGNLGRAVFQAKKRLLEPLGLVEEAAKTAPGKKRPVEQSPQEPDSSAGIGKSGAQPAKKRLNFGQTGDTESVPDPQPIGEPPAAPSGVGSLTMASGGGAPVADNNEGADGVGSSSGNWHCDSQWLGDRVITTSTRTWALPTYNNHLYKQISNSTSGGSSNDNAYFGYSTPWGYFDFNRFHCHFSPRDWQRLINNNWGFRPKRLNFKLFNIQVKEVTDNNGVKTIANNLTSTVQVFTDSDYQLPYVLGSAHEGCLPPFPADVFMIPQYGYLTLNDGSQAVGRSSFYCLEYFPSQMLRTGNNFQFSYEFENVPFHSSYAHSQSLDRLMNPLIDQYLYYLSKTHNGSGQGQQTLKFSVAGPSNMAVQGRNYIPGPSYRQQRVSTTVTFNNNSEFAWPGASSWALNGRNSLMNPGPAMASHKEGEDRFFPLSGSLIFGKQGTGRDNVDADKVMITNEEEIKTTNPVATESYGQVATNHQSARAQAQTGWVQNQGILPGMVWQDRDVYLQGPIWAKIPHTDGNFHPSPLMGGFGMKHPPPQILIKNTPVPADPPTAFNKGKLNSFITQYSTGQVSVEIEWELQKENSKRWNPEIQYTSNYYKSNNVEFAVNTEGVYSEPRPIGTRYLTRNL

SEQ ID NO: 965 - DNA, 2208 bp, synthetic construct
  misc_feature 1..2208: note = Adeno Associated Virus Capsid Protein Variant
  source 1..2208: mol_type = other DNA
atggctgccgatggttatcttccagattggctcgaggacaaccttagtgaaggaattcgcgagtggtgggctttgaaacctggagcccctcaacccaaggcaaatcaacaacatcaagacaacgctcgaggtcttgtgcttccgggttacaaataccttggacccggcaacggactcgacaagggggagccggtcaacgcagcagacgcggcggccctcgagcacgacaaggcctacgaccagcagctcaaggccggagacaacccgtacctcaagtacaaccacgccgacgccgagttccaggagcggctcaaagaagatacgtcttttgggggcaacctcgggcgagcagtcttccaggccaaaaagaggcttcttgaacctcttggtctggttgaggaagcggctaagacggctcctggaaagaagaggcctgtagagcagtctcctcaggaaccggactcctccgcgggtattggcaaatcgggtgcacagcccgctaaaaagagactcaatttcggtcagactggcgacacagagtcagtcccagaccctcaaccaatcggagaacctcccgcagccccctcaggtgtgggatctcttacaatggcttcaggtggtggcgcaccagtggcagacaataacgaaggtgccgatggagtgggtagttcctcgggaaattggcattgcgattcccaatggctgggggacagagtcatcaccaccagcacccgaacctgggccctgcccacctacaacaatcacctctacaagcaaatctccaacagcacatctggaggatcttcaaatgacaacgcctacttcggctacagcaccccctgggggtattttgacttcaacagattccactgccacttctcaccacgtgactggcagcgactcatcaacaacaactggggattccggcctaagcgactcaacttcaagctcttcaacattcaggtcaaagaggttacggacaacaatggagtcaagaccatcgccaataaccttaccagcacggtccaggtcttcacggactcagactatcagctcccgtacgtgctcgggtcggctcacgagggctgcctcccgccgttcccagcggacgttttcatgattcctcagtacgggtatctgacgcttaatgatggaagccaggccgtgggtcgttcgtccttttactgcctggaatatttcccgtcgcaaatgctaagaacgggtaacaacttccagttcagctacgagtttgagaacgtacctttccatagcagctacgctcacagccaaagcctggaccgactaatgaatccactcatcgaccaatacttgtactatctctcaaagactattaacggttctggacagggccaacaaacgctaaaattcagtgtggccggacccagcaacatggctgtccagggaagaaactacatacctggacccagctaccgacaacaacgtgtctcaaccactgtgacttttaacaacaacagcgaatttgcttggcctggagcttcttcttgggctctcaatggacgtaatagcttgatgaatcctggacctgctatggccagccacaaagaaggagaggaccgtttctttcctttgtctggatctttaatttttggcaaacaaggaactggaagagacaacgtggatgcggacaaagtcatgataaccaacgaagaaactattaaaactactaacccggtagcaacggagtcctatggacaagtggccacaaaccaccagagtgcccgggcacaggcgcagaccggctgggttcaaaaccaaggaatacttccgggtatggtttggcaggacagagatgtgtacctgcaaggacccatttgggccaaaattcctcacacggacggcaactttcacccttctccgctgatgggagggtttggaatgaagcacccgcctcctcagatcctcatcaaaaacacacctgtacctgcggatcctccaacggccttcaacaagggcaagctgaactctttcatcacccagtattctactggccaagtcagcgtggagatcgagtgggagctgcagaaggaaaacagcaagcgctggaacccggagatccagtacacttccaactattacaagtctaataatgttgaatttgctgttaatactgaaggtgtatatagtgaaccccgccccattggcaccagatacctgactcgtaatctg

SEQ ID NO: 966 - protein, 736 aa, synthetic construct
  REGION 1..736: note = Adeno Associated Virus Capsid Protein Variant
MAADGYLPDWLEDNLSEGIREWWALKPGAPQPKANQQHQDNARGLVLPGYKYLGPGNGLDKGEPVNAADAAALEHDKAYDQQLKAGDNPYLKYNHADAEFQERLKEDTSFGGNLGRAVFQAKKRLLEPLGLVEEAAKTAPGKKRPVEQSPQEPDSSAGIGKSGAQPAKKRLNFGQTGDTESVPDPQPIGEPPAAPSGVGSLTMASGGGAPVADNNEGADGVGSSSGNWHCDSQWLGDRVITTSTRTWALPTYNNHLYKQISNSTSGGSSNDNAYFGYSTPWGYFDFNRFHCHFSPRDWQRLINNNWGFRPKRLNFKLFNIQVKEVTDNNGVKTIANNLTSTVQVFTDSDYQLPYVLGSAHEGCLPPFPADVFMIPQYGYLTLNDGSQAVGRSSFYCLEYFPSQMLRTGNNFQFSYEFENVPFHSSYAHSQSLDRLMNPLIDQYLYYLSKTINGSGQGQQTLKFSVAGPSNMAVQGRNYIPGPSYRQQRVSTTVTFNNNSEFAWPGASSWALNGRNSLMNPGPAMASHKEGEDRFFPLSGSLIFGKQGTGRDNVDADKVMITNEETIKTTNPVATESYGQVATNHQSARAQAQTGWVQNQGILPGMVWQDRDVYLQGPIWAKIPHTDGNFHPSPLMGGFGMKHPPPQILIKNTPVPADPPTAFNKGKLNSFITQYSTGQVSVEIEWELQKENSKRWNPEIQYTSNYYKSNNVEFAVNTEGVYSEPRPIGTRYLTRNL

SEQ ID NO: 967 - DNA, 2208 bp, synthetic construct
  misc_feature 1..2208: note = Adeno Associated Virus Capsid Protein Variant
  source 1..2208: mol_type = other DNA
atggctgccgatggttatcttccagattggctcgaggacaaccttagtgaaggaattcgcgagtggtgggctttgaaacctggagcccctcaacccaaggcaaatcaacaacatcaagacaacgctcgaggtcttgtgcttccgggttacaaataccttggacccggcaacggactcgacaagggggagccggtcaacgcagcagacgcggcggccctcgagcacgacaaggcctacgaccagcagctcaaggccggagacaacccgtacctcaagtacaaccacgccgacgccgagttccaggagcggctcaaagaagatacgtcttttgggggcaacctcgggcgagcagtcttccaggccaaaaagaggcttcttgaacctcttggtctggttgaggaagcggctaagacggctcctggaaagaagaggcctgtagagcagtctcctcaggaaccggactcctccgcgggtattggcaaatcgggtgcacagcccgctaaaaagagactcaatttcggtcagactggcgacacagagtcagtcccagaccctcaaccaatcggagaacctcccgcagccccctcaggtgtgggatctcttacaatggcttcaggtggtggcgcaccagtggcagacaataacgaaggtgccgatggagtgggtagttcctcgggaaattggcattgcgattcccaatggctgggggacagagtcatcaccaccagcacccgaacctgggccctgcccacctacaacaatcacctctacaagcaaatctccaacagcacatctggaggatcttcaaatgacaacgcctacttcggctacagcaccccctgggggtattttgacttcaacagattccactgccacttctcaccacgtgactggcagcgactcatcaacaacaactggggattccggcctaagcgactcaacttcaagctcttcaacattcaggtcaaagaggttacggacaacaatggagtcaagaccatcgccaataaccttaccagcacggtccaggtcttcacggactcagactatcagctcccgtacgtgctcgggtcggctcacgagggctgcctcccgccgttcccagcggacgttttcatgattcctcagtacgggtatctgacgcttaatgatggaagccaggccgtgggtcgttcgtccttttactgcctggaatatttcccgtcgcaaatgctaagaacgggtaacaacttccagttcagctacgagtttgagaacgtacctttccatagcagctacgctcacagccaaagcctggaccgactaatgaatccactcatcgaccaatacttgtactatctctcaaagactattaacggttctggacagggccaacaaacgctaaaattcagtgtggccggacccagcaacatggctgtccagggaagaaactacatacctggacccagctaccgacaacaacgtgtctcaaccactgtgacttttaacaacaacagcgaatttgcttggcctggagcttcttcttggggcctcaatggacgtaatagcttgatgaatcctggacctgctatggccagccacaaagaaggagaggaccgtttctttcctttgtctggatctttaatttttggcaaacaaggaactggaagagacaacgtggatgcggacaaagtcatgataaccaacgaagaagaaattaaaactactaacccggtagcaacggagtcctatggacaagtggccacaaaccaccagagtgcccgggcacaggcgcagaccggctgggttcaaaaccaaggaatacttccgggtatggtttggcaggacagagatgtgtacctgcaaggacccatttgggccaaaattcctcacacggacggcaactttcacccttctccgctgatgggagggtttggaatgaagcacccgcctcctcagatcctcatcaaaaacacacctgtacctgcggatcctccaacggccttcaacaagggcaagctgaactctttcatcacccagtattctactggccaagtcagcgtggagatcgagtgggagctgcagaaggaaaacagcaagcgctggaacccggagatccagtacacttccaactattacaagtctaataatgttgaatttgctgttaatactgaaggtgtatatagtgaaccccgccccattggcaccagatacctgactcgtaatctg

SEQ ID NO: 968 - protein, 736 aa, synthetic construct
  REGION 1..736: note = Adeno Associated Virus Capsid Protein Variant
MAADGYLPDWLEDNLSEGIREWWALKPGAPQPKANQQHQDNARGLVLPGYKYLGPGNGLDKGEPVNAADAAALEHDKAYDQQLKAGDNPYLKYNHADAEFQERLKEDTSFGGNLGRAVFQAKKRLLEPLGLVEEAAKTAPGKKRPVEQSPQEPDSSAGIGKSGAQPAKKRLNFGQTGDTESVPDPQPIGEPPAAPSGVGSLTMASGGGAPVADNNEGADGVGSSSGNWHCDSQWLGDRVITTSTRTWALPTYNNHLYKQISNSTSGGSSNDNAYFGYSTPWGYFDFNRFHCHFSPRDWQRLINNNWGFRPKRLNFKLFNIQVKEVTDNNGVKTIANNLTSTVQVFTDSDYQLPYVLGSAHEGCLPPFPADVFMIPQYGYLTLNDGSQAVGRSSFYCLEYFPSQMLRTGNNFQFSYEFENVPFHSSYAHSQSLDRLMNPLIDQYLYYLSKTINGSGQGQQTLKFSVAGPSNMAVQGRNYIPGPSYRQQRVSTTVTFNNNSEFAWPGASSWGLNGRNSLMNPGPAMASHKEGEDRFFPLSGSLIFGKQGTGRDNVDADKVMITNEEEIKTTNPVATESYGQVATNHQSARAQAQTGWVQNQGILPGMVWQDRDVYLQGPIWAKIPHTDGNFHPSPLMGGFGMKHPPPQILIKNTPVPADPPTAFNKGKLNSFITQYSTGQVSVEIEWELQKENSKRWNPEIQYTSNYYKSNNVEFAVNTEGVYSEPRPIGTRYLTRNL

SEQ ID NO: 969 - DNA, 2208 bp, synthetic construct
  misc_feature 1..2208: note = Adeno Associated Virus Capsid Protein Variant
  source 1..2208: mol_type = other DNA
atggctgccgatggttatcttccagattggctcgaggacaaccttagtgaaggaattcgcgagtggtgggctttgaaacctggagcccctcaacccaaggcaaatcaacaacatcaagacaacgctcgaggtcttgtgcttccgggttacaaataccttggacccggcaacggactcgacaagggggagccggtcaacgcagcagacgcggcggccctcgagcacgacaaggcctacgaccagcagctcaaggccggagacaacccgtacctcaagtacaaccacgccgacgccgagttccaggagcggctcaaagaagatacgtcttttgggggcaacctcgggcgagcagtcttccaggccaaaaagaggcttcttgaacctcttggtctggttgaggaagcggctaagacggctcctggaaagaagaggcctgtagagcagtctcctcaggaaccggactcctccgcgggtattggcaaatcgggtgcacagcccgctaaaaagagactcaatttcggtcagactggcgacacagagtcagtcccagaccctcaaccaatcggagaacctcccgcagccccctcaggtgtgggatctcttacaatggcttcaggtggtggcgcaccagtggcagacaataacgaaggtgccgatggagtgggtagttcctcgggaaattggcattgcgattcccaatggctgggggacagagtcatcaccaccagcacccgaacctgggccctgcccacctacaacaatcacctctacaagcaaatctccaacagcacatctggactctcttcaaatgacaacgcctacttcggctacagcaccccctgggggtattttgacttcaacagattccactgccacttctcaccacgtgactggcagcgactcatcaacaacaactggggattccggcctaagcgactcaacttcaagctcttcaacattcaggtcaaagaggttacggacaacaatggagtcaagaccatcgccaataaccttaccagcacggtccaggtcttcacggactcagactatcagctcccgtacgtgctcgggtcggctcacgagggctgcctcccgccgttcccagcggacgttttcatgattcctcagtacgggtatctgacgcttaatgatggaagccaggccgtgggtcgttcgtccttttactgcctggaatatttcccgtcgcaaatgctaagaacgggtaacaacttccagttcagctacgagtttgagaacgtacctttccatagcagctacgctcacagccaaagcctggaccgactaatgaatccactcatcgaccaatacttgtactatctctcaaagactattaacggttctggacagggccaacaaacgctaaaattcagtgtggccggacccagcaacatggctgtccagggaagaaactacatacctggacccagctaccgacaacaacgtgtctcaaccactgtgacttttaacaacaacagcgaatttgcttggcctggagcttcttcttgggctctcaatggacgtaatagcttgatgaatcctggacctgctatggccagccacaaagaaggagaggaccgtttctttcctttgtctggatctttaatttttggcaaacaaggaactggaagagacaacgtggatgcggacaaagtcatgataaccaacgaagaagaaattaaaactactaacccggtagcaacggagtcctatggacaagtggccacaaaccaccagagtgcccgggcacaggcgcagaccggctgggttcaaaaccaaggaatacttccgggtatggtttggcaggacagagatgtgtacctgcaaggacccatttgggccaaaattcctcacacggacggcaactttcacccttctccgctgatgggagggtttggaatgaagcacccgcctcctcagatcctcatcaaaaacacacctgtacctgcggatcctccaacggccttcaacaagggcaagctgaactctttcatcacccagtattctactggccaagtcagcgtggagatcgagtgggagctgcagaaggaaaacagcaagcgctggaacccggagatccagtacacttccaactattacaagtctaataatgttgaatttgctgttaatactgaaggtgtatatagtgaaccccgccccattggcaccagatacctgactcgtaatctg

SEQ ID NO: 970 - protein, 736 aa, synthetic construct; identical to SEQ ID NO: 948
  REGION 1..736: note = Adeno Associated Virus Capsid Protein Variant

SEQ ID NO: 971 - DNA, 2208 bp, synthetic construct
  misc_feature 1..2208: note = Adeno Associated Virus Capsid Protein Variant
  source 1..2208: mol_type = other DNA
atggctgccgatggttatcttccagattggctcgaggacaaccttagtgaaggaattcgcgagtggtgggctttgaaacctggagcccctcaacccaaggcaaatcaacaacatcaagacaacgctcgaggtcttgtgcttccgggttacaaataccgtggacccggcaacggactcgacaagggggagccggtcaacgcagcagacgcggcggccctcgagcacgacaaggcctacgaccagcagctcaaggccggagacaacccgtacctcaagtacaaccacgccgacgccgagttccaggagcggctcaaagaagatacgtcttttgggggcaacctcgggcgagcagtcttccaggccaaaaagaggcttcttgaacctcttggtctggttgaggaagcggctaagacggctcctggaaagaagaggcctgtagagcagtctcctcaggaaccggactcctccgcgggtattggcaaatcgggtgcacagcccgctaaaaagagactcaatttcggtcagactggcgacacagagtcagtcccagaccctcaaccaatcggagaacctcccgcagccccctcaggtgtgggatctcttacaatggcttcaggtggtggcgcaccagtggcagacaataacgaaggtgccgatggagtgggtagttcctcgggaaattggcattgcgattcccaatggctgggggacagagtcatcaccaccagcacccgaacctgggccctgcccacctacaacaatcacctctacaagcaaatctccaacagcacatctggaggatcttcaaatgacaacgcctacttcggctacagcaccccctgggggtattttgacttcaacagattccactgccacttctcaccacgtgactggcagcgactcatcaacaacaactggggattccggcctaagcgactcaacttcaagctcttcaacattcaggtcaaagaggttacggacaacaatggagtcaagaccatcgccaataaccttaccagcacggtccaggtcttcacggactcagactatcagctcccgtacgtgctcgggtcggctcacgagggctgcctcccgccgttcccagcggacgttttcatgattcctcagtacgggtatctgacgcttaatgatggaagccaggccgtgggtcgttcgtccttttactgcctggaatatttcccgtcgcaaatgctaagaacgggtaacaacttccagttcagctacgagtttgagaacgtacctttccatagcagctacgctcacagccaaagcctggaccgactaatgaatccactcatcgaccaatacttgtactatctctcaaagactattaacggttctggacagggccaacaaacgctaaaattcagtgtggccggacccagcaacatggctgtccagggaagaaactacatacctggacccagctaccgacaacaacgtgtctcaaccactgtgacttttaacaacaacagcgaatttgcttggcctggagcttcttcttgggctctcaatggacgtaatagcttgatgaatcctggacctgctatggccagccacaaagaaggagaggaccgtttctttcctttgtctggatctttaatttttggcaaacaaggaactggaagagacaacgtggatgcggacaaagtcatgataaccaacgaagaagaaattaaaactactaacccggtagcaacggagtcctatggacaagtggccacaaaccaccagagtgcccgggcacaggcgcagaccggctgggttcaaaaccaaggaatacttccgggtatggtttggcaggacagagatgtgtacctgcaaggacccatttgggccaaaattcctcacacggacggcaactttcacccttctccgctgatgggagggtttggaatgaagcacccgcctcctcagatcctcatcaaaaacacacctgtacctgcggatcctccaacggccttcaacaagggcaagctgaactctttcatcacccagtattctactggccaagtcagcgtggagatcgagtgggagctgcagaaggaaaacagcaagcgctggaacccggagatccagtacacttccaactattacaagtctaataatgttgaatttgctgttaatactgaaggtgtatatagtgaaccccgccccattggcaccagatacctgactcgtaatctg

SEQ ID NO: 972 - protein, 736 aa, synthetic construct
  REGION 1..736: note = Adeno Associated Virus Capsid Protein Variant
MAADGYLPDWLEDNLSEGIREWWALKPGAPQPKANQQHQDNARGLVLPGYKYRGPGNGLDKGEPVNAADAAALEHDKAYDQQLKAGDNPYLKYNHADAEFQERLKEDTSFGGNLGRAVFQAKKRLLEPLGLVEEAAKTAPGKKRPVEQSPQEPDSSAGIGKSGAQPAKKRLNFGQTGDTESVPDPQPIGEPPAAPSGVGSLTMASGGGAPVADNNEGADGVGSSSGNWHCDSQWLGDRVITTSTRTWALPTYNNHLYKQISNSTSGGSSNDNAYFGYSTPWGYFDFNRFHCHFSPRDWQRLINNNWGFRPKRLNFKLFNIQVKEVTDNNGVKTIANNLTSTVQVFTDSDYQLPYVLGSAHEGCLPPFPADVFMIPQYGYLTLNDGSQAVGRSSFYCLEYFPSQMLRTGNNFQFSYEFENVPFHSSYAHSQSLDRLMNPLIDQYLYYLSKTINGSGQGQQTLKFSVAGPSNMAVQGRNYIPGPSYRQQRVSTTVTFNNNSEFAWPGASSWALNGRNSLMNPGPAMASHKEGEDRFFPLSGSLIFGKQGTGRDNVDADKVMITNEEEIKTTNPVATESYGQVATNHQSARAQAQTGWVQNQGILPGMVWQDRDVYLQGPIWAKIPHTDGNFHPSPLMGGFGMKHPPPQILIKNTPVPADPPTAFNKGKLNSFITQYSTGQVSVEIEWELQKENSKRWNPEIQYTSNYYKSNNVEFAVNTEGVYSEPRPIGTRYLTRNL

SEQ ID NO: 973 - DNA, 2208 bp, synthetic construct
  misc_feature 1..2208: note = Adeno Associated Virus Capsid Protein Variant
  source 1..2208: mol_type = other DNA
atggctgccgatggttatcttccagattggctcgaggacaaccttagtgaaggaattcgcgagtggtgggctttgaaacctggagcccctcaacccaaggcaaatcaacaacatcaagacaacgctcgaggtcttgtgcttccgggttacaaataccttggacccggcaacggactcgacaagggggagccggtcaacgcagcagacgcggcggccctcgagcacgacaaggcctacgaccagcagctcaaggccggagacaacccgtacctcaagtacaaccacgccgacgccgagttccaggagcggctcaaagaagatacgtcttttgggggcaacctcgggcgagcagtcttccaggccaaaaagaggcttcttgaacctcttggtctggttgaggaagcggctaagacggctcctggaaagaagaggcctgtagagcagtctcctcaggaaccggactcctccgcgggtattggcaaatcgggtgcacagcccgctaaaaagagactcaatttcggtcagactggcgacacagagtcagtcccagaccctcaaccaatcggagaacctcccgcagccccctcaggtgtgggatctcttacaatggcttcaggtggtggcgcaccagtggcagacaataacgaaggtgccgatggagtgggtagttcctcgggaaattggcattgcgattcccaatggctgggggacagagtcatcaccaccagcacccgaacctgggccctgcccacctacaacaatcacctctacaagcaaatctccaacacgacatctggaggatcttcaaatgacaacgcctacttcggctacagcaccccctgggggtattttgacttcaacagattccactgccacttctcaccacgtgactggcagcgactcatcaacaacaactggggattccggcctaagcgactcaacttcaagctcttcaacattcaggtcaaagaggttacggacaacaatggagtcaagaccatcgccaataaccttaccagcacggtccaggtcttcacggactcagactatcagctcccgtacgtgctcgggtcggctcacgagggctgcctcccgccgttcccagcggacgttttcatgattcctcagtacgggtatctgacgcttaatgatggaagccaggccgtgggtcgttcgtccttttactgcctggaatatttcccgtcgcaaatgctaagaacgggtaacaacttccagttcagctacgagtttgagaacgtacctttccatagcagctacgctcacagccaaagcctggaccgactaatgaatccactcatcgaccaatacttgtactatctctcaaagactattaacggttctggacagggccaacaaacgctaaaattcagtgtggccggacccagcaacatggctgtccagggaagaaactacatacctggacccagctaccgacaacaacgtgtctcaaccactgtgacttttaacaacaacagcgaatttgcttggcctggagcttcttcttgggctctcaatggacgtaatagcttgatgaatcctggacctgctatggccagccacaaagaaggagaggaccgtttctttcctttgtctggatctttaatttttggcaaacaaggaactggaagagacaacgtggatgcggacaaagtcatgataaccaacgaagaagaaattaaaactactaacccggtagcaacggagtcctatggacaagtggccacaaaccaccagagtgcccgggcacaggcgcagaccggctgggttcaaaaccaaggaatacttccgggtatggtttggcaggacagagatgtgtacctgcaaggacccatttgggccaaaattcctcacacggacggcaactttcacccttctccgctgatgggagggtttggaatgaagcacccgcctcctcagatcctcatcaaaaacacacctgtacctgcggatcctccaacggccttcaacaagggcaagctgaactctttcatcacccagtattctactggccaagtcagcgtggagatcgagtgggagctgcagaaggaaaacagcaagcgctggaacccggagatccagtacacttccaactattacaagtctaataatgttgaatttgctgttaatactgaaggtgtatatagtgaaccccgccccattggcaccagatacctgactcgtaatctg

SEQ ID NO: 974 - protein, 736 aa, synthetic construct; identical to SEQ ID NO: 946
  REGION 1..736: note = Adeno Associated Virus Capsid Protein Variant

SEQ ID NO: 975 - DNA, 2208 bp, synthetic construct
  misc_feature 1..2208: note = Adeno Associated Virus Capsid Protein Variant
  source 1..2208: mol_type = other DNA
atggctgccgatggttatcttccagattggctcgaggacaaccttagtgaaggaattcgcgagtggtgggctttgaaacctggagcccctcaacccaaggcaaatcaacaacatcaagacaacgctcgaggtcttgtgcttccgggttacaaataccttggacccggcaacggactcgacaagggggagccggtcaacgcagcagacgcggcggccctcgagcacgacaaggcctacgaccagcagctcaaggccggagacaacccgtacctcaagtacaaccacgccgacgccgagttccaggagcggctcaaagaagatacgtcttttgggggcaacctcgggcgagcagtcttccaggccaaaaagaggcttcttgaacctcttggtctggttgaggaagcggctaagacggctcctggaaagaagaggcctgtagagcagtctcctcaggaaccggactcctccgcgggtattggcaaatcgggtgcacagcccgctaaaaagagactcaatttcggtcagactggcgacacagagtcagtcccagaccctcaaccaatcggagaacctcccgcagccccctcaggtgtgggatctcttacaatggcttcaggtggtggcgcaccagtggcagacaataacgaaggtgccgatggagtgggtagttcctcgggaaattggcattgcgattcccaatggctgggggacagagtcatcaccaccagcacccgaacctgggccctgcccacctacaacaatcacctctacaagcaaatctccaacagcacatctggaggatcttcaaatgacaacgcctacttcggctacagcaccccctgggggtattttgacttcaacagattccactgccacttctcaccacgtgactggcagcgactcatcaacaacaactggggattccggcctaagcgactcaacttcaagctcttcaacattcaggtcaaagaggttacggacaacaatggagtcaagaccatcgccaataaccttaccagcacggtccaggtcttcacggactcagactatcagctcccgtacgtgctcgggtcggctcacgagggctgcctcccgccgttcccagcggacgttttcatgattcctcagtacgggtatctgacgcttaatgatggaagccaggccgtgggtcgttcgtccttttactgcctggaatatttcccgtcgcaaatgctaagaacgggtaacaacttccagttcagctacgagtttgagaacgtacctttccatagcagctacgctcacagccaaagcctggaccgactaatgaatccactcatcgaccaatacttgtactatctctcaaagacttctaacggttctggacagggccaacaaacgctaaaattcagtgtggccggacccagcaacatggctgtccagggaagaaactacatacctggacccagctaccgacaacaacgtgtctcaaccactgtgacttttaacaacaacagcgaatttgcttggcctggagcttcttcttgggctctcaatggacgtaatagcttgatgaatcctggacctgctatggccagccacaaagaaggagaggaccgtttctttcctttgtctggatctttaatttttggcaaacaaggaactggaagagacaacgtggatgcggacaaagtcatgataaccaacgaagaagaaattaaaactactaacccggtagcaacggagtcctatggacaagtggccacaaaccaccagagtgcccgggcacaggcgcagaccggctgggttcaaaaccaaggaatacttccgggtatggtttggcaggacagagatgtgtacctgcaaggacccatttgggccaaaattcctcacacggacggcaactttcacccttctccgctgatgggagggtttggaatgaagcacccgcctcctcagatcctcatcaaaaacacacctgtacctgcggatcctccaacggccttcaacaagggcaagctgaactctttcatcacccagtattctactggccaagtcagcgtggagatcgagtgggagctgcagaaggaaaacagcaagcgctggaacccggagatccagtacacttccaactattacaagtctaataatgttgaatttgctgttaatactgaaggtgtatatagtgaaccccgccccattggcaccagatacctgactcgtaatctg

SEQ ID NO: 976 - protein, 736 aa, synthetic construct
  REGION 1..736: note = Adeno Associated Virus Capsid Protein Variant
MAADGYLPDWLEDNLSEGIREWWALKPGAPQPKANQQHQDNARGLVLPGYKYLGPGNGLDKGEPVNAADAAALEHDKAYDQQLKAGDNPYLKYNHADAEFQERLKEDTSFGGNLGRAVFQAKKRLLEPLGLVEEAAKTAPGKKRPVEQSPQEPDSSAGIGKSGAQPAKKRLNFGQTGDTESVPDPQPIGEPPAAPSGVGSLTMASGGGAPVADNNEGADGVGSSSGNWHCDSQWLGDRVITTSTRTWALPTYNNHLYKQISNSTSGGSSNDNAYFGYSTPWGYFDFNRFHCHFSPRDWQRLINNNWGFRPKRLNFKLFNIQVKEVTDNNGVKTIANNLTSTVQVFTDSDYQLPYVLGSAHEGCLPPFPADVFMIPQYGYLTLNDGSQAVGRSSFYCLEYFPSQMLRTGNNFQFSYEFENVPFHSSYAHSQSLDRLMNPLIDQYLYYLSKTSNGSGQGQQTLKFSVAGPSNMAVQGRNYIPGPSYRQQRVSTTVTFNNNSEFAWPGASSWALNGRNSLMNPGPAMASHKEGEDRFFPLSGSLIFGKQGTGRDNVDADKVMITNEEEIKTTNPVATESYGQVATNHQSARAQAQTGWVQNQGILPGMVWQDRDVYLQGPIWAKIPHTDGNFHPSPLMGGFGMKHPPPQILIKNTPVPADPPTAFNKGKLNSFITQYSTGQVSVEIEWELQKENSKRWNPEIQYTSNYYKSNNVEFAVNTEGVYSEPRPIGTRYLTRNL

SEQ ID NO: 977 - DNA, 2208 bp, synthetic construct
  misc_feature 1..2208: note = Adeno Associated Virus Capsid Protein Variant
  source 1..2208: mol_type = other DNA
atggctgccgatggttatcttccagattggctcgaggacaaccttagtgaaggaattcgcgagtggtgggctttgaaacctggagcccctcaaccctttgcaaatcaacaacatcaagacaacgctcgaggtcttgtgcttccgggttacaaataccttggacccggcaacggactcgacaagggggagccggtcaacgcagcagacgcggcggccctcgagcacgacaaggcctacgaccagcagctcaaggccggagacaacccgtacctcaagtacaaccacgccgacgccgagttccaggagcggctcaaagaagatacgtcttttgggggcaacctcgggcgagcagtcttccaggccaaaaagaggcttcttgaacctcttggtctggttgaggaagcggctaagacggctcctggaaagaagaggcctgtagagcagtctcctcaggaaccggactcctccgcgggtattggcaaatcgggtgcacagcccgctaaaaagagactcaatttcggtcagactggcgacacagagtcagtcccagaccctcaaccaatcggagaacctcccgcagccccctcaggtgtgggatctcttacaatggcttcaggtggtggcgcaccagtggcagacaataacgaaggtgccgatggagtgggtagttcctcgggaaattggcattgcgattcccaatggctgggggacagagtcatcaccaccagcacccgaacctgggccctgcccacctacaacaatcacctctacaagcaaatctccaacagcacatctggaggatcttcaaatgacaacgcctacttcggctacagcaccccctgggggtattttgacttcaacagattccactgccacttctcaccacgtgactggcagcgactcatcaacaacaactggggattccggcctaagcgactcaacttcaagctcttcaacattcaggtcaaagaggttacggacaacaatggagtcaagaccatcgccaataaccttaccagcacggtccaggtcttcacggactcagactatcagctcccgtacgtgctcgggtcggctcacgagggctgcctcccgccgttcccagcggacgttttcatgattcctcagtacgggtatctgacgcttaatgatggaagccaggccgtgggtcgttcgtccttttactgcctggaatatttcccgtcgcaaatgctaagaacgggtaacaacttccagttcagctacgagtttgagaacgtacctttccatagcagctacgctcacagccaaagcctggaccgactaatgaatccactcatcgaccaatacttgtactatctctcaaagactattaacggttctggacagggccaacaaacgctaaaattcagtgtggccggacccagcaacatggctgtccagggaagaaactacatacctggacccagctaccgacaacaacgtgtctcaaccactgtgacttttaacaacaacagcgaatttgcttggcctggagcttcttcttgggctctcaatggacgtaatagcttgatgaatcctggacctgctatggccagccacaaagaaggagaggaccgtttctttcctttgtctggatctttaatttttggcaaacaaggaactggaagagacaacgtggatgcggacaaagtcatgataaccaacgaagaagaaattaaaactactaacccggtagcaacggagtcctatggacaagtggccacaaaccaccagagtgcccgggcacaggcgcagaccggctgggttcaaaaccaaggaatacttccgggtatggtttggcaggacagagatgtgtacctgcaaggacccatttgggccaaaattcctcacacggacggcaactttcacccttctccgctgatgggagggtttggaatgaagcacccgcctcctcagatcctcatcaaaaacacacctgtacctgcggatcctccaacggccttcaacaagggcaagctgaactctttcatcacccagtattctactggccaagtcagcgtggagatcgagtgggagctgcagaaggaaaacagcaagcgctggaacccggagatccagtacacttccaactattacaagtctaataatgttgaatttgctgttaatactgaaggtgtatatagtgaaccccgccccattggcaccagatacctgactcgtaatctg

SEQ ID NO: 978 - protein, 736 aa, synthetic construct
  REGION 1..736: note = Adeno Associated Virus Capsid Protein Variant
MAADGYLPDWLEDNLSEGIREWWALKPGAPQPFANQQHQDNARGLVLPGYKYLGPGNGLDKGEPVNAADAAALEHDKAYDQQLKAGDNPYLKYNHADAEFQERLKEDTSFGGNLGRAVFQAKKRLLEPLGLVEEAAKTAPGKKRPVEQSPQEPDSSAGIGKSGAQPAKKRLNFGQTGDTESVPDPQPIGEPPAAPSGVGSLTMASGGGAPVADNNEGADGVGSSSGNWHCDSQWLGDRVITTSTRTWALPTYNNHLYKQISNSTSGGSSNDNAYFGYSTPWGYFDFNRFHCHFSPRDWQRLINNNWGFRPKRLNFKLFNIQVKEVTDNNGVKTIANNLTSTVQVFTDSDYQLPYVLGSAHEGCLPPFPADVFMIPQYGYLTLNDGSQAVGRSSFYCLEYFPSQMLRTGNNFQFSYEFENVPFHSSYAHSQSLDRLMNPLIDQYLYYLSKTINGSGQGQQTLKFSVAGPSNMAVQGRNYIPGPSYRQQRVSTTVTFNNNSEFAWPGASSWALNGRNSLMNPGPAMASHKEGEDRFFPLSGSLIFGKQGTGRDNVDADKVMITNEEEIKTTNPVATESYGQVATNHQSARAQAQTGWVQNQGILPGMVWQDRDVYLQGPIWAKIPHTDGNFHPSPLMGGFGMKHPPPQILIKNTPVPADPPTAFNKGKLNSFITQYSTGQVSVEIEWELQKENSKRWNPEIQYTSNYYKSNNVEFAVNTEGVYSEPRPIGTRYLTRNL

SEQ ID NO: 979 - DNA, 2208 bp, synthetic construct
  misc_feature 1..2208: note = Adeno Associated Virus Capsid Protein Variant
  source 1..2208: mol_type = other DNA
atggctgccgatggttatcttccagattggctcgaggacaaccttagtgaaggaattcgcgagtggtgggctttgaaacctggagcccctcaacccaaggcaaatcaacaacatcaagacaacgctcgaggtcttgtgcttccgggttacaaataccttggacccggcaacggactcgacaagggggagccggtcaacgcagcagacgcggcggccctcgagcacgacaaggcctacgaccagcagctcaaggccggagacaacccgtacctcaagtacaaccacgccgacgccgagttccaggagcggctcaaagaagatacgtcttttgggggcaacctcgggcgagcagtcttccaggccaaaaagaggcttcttgaacctcttggtctggttgaggaagcggctaagacggctcctggaaagaagaggcctgtagagcagtctcctcaggaaccggactcctccgcgggtattggcaaatcgggtgcacagcccgctaaaaagagactcaatttcggtcagactggcgacacagagtcagtcccagaccctcaaccaatcggagaacctcccgcagccccctcaggtgtgggatctcttacaatggcttcaggtggtggcgcaccagtggcagacaataacgaaggtgccgatggagtgggtagttcctcgggaaattggcattgcgattcccaatggctgggggacagagtcatcaccaccagcacccgaacctgggccctgcccacctacaacaatcacctctacaagcaaatctccaacagcacatctggaggatcttcaaatgacaacgcctacttcggctacagcaccccctgggggtattttgacttcaacagattccactgccacttctcaccacgtgactggcagcgactcatcaacaacaactggggattccggcctaagcgactcaacttcaagctcttcaacattcaggtcaaagaggttacggacaacaatggagtcaagaccatcgccaataaccttaccagcacggtccaggtcttcacggactcagactatcagctcccgtacgtgctcgggtcggctcacgagggctgcctcccgccgttcccagcggacgttttcatgattcctcagtacgggtatctgacgcttaatgatggaagccaggccgtgggtcgttcgtccttttactgcctggaatatttcccgtcgcaaatgctaagaacgggtaacaacttccagttcagctacgagtttgagaacgtacctttccatagcagctacgctcacagccaaagcctggaccgactaatgaatccactcatcgaccaatacttgtactatctctcaaagactattaacggttctggacagggccaacaaacgctaaaattcagtgtggccggacccagcgggatggctgtccagggaagaaactacatacctggacccagctaccgacaacaacgtgtctcaaccactgtgacttttaacaacaacagcgaatttgcttggcctggagcttcttcttgggctctcaatggacgtaatagcttgatgaatcctggacctgctatggccagccacaaagaaggagaggaccgtttctttcctttgtctggatctttaatttttggcaaacaaggaactggaagagacaacgtggatgcggacaaagtcatgataaccaacgaagaagaaattaaaactactaacccggtagcaacggagtcctatggacaagtggccacaaaccaccagagtgcccgggcacaggcgcagaccggctgggttcaaaaccaaggaatacttccgggtatggtttggcaggacagagatgtgtacctgcaaggacccatttgggccaaaattcctcacacggacggcaactttcacccttctccgctgatgggagggtttggaatgaagcacccgcctcctcagatcctcatcaaaaacacacctgtacctgcggatcctccaacggccttcgacaagggcaagctgaactctttcatcacccagtattctactggccaagtcagcgtggagatcgagtgggagctgcagaaggaaaacagcaagcgctggaacccggagatccagtacacttccaactattacaagtctaataatgttgaatttgctgttaatactgaaggtgtatatagtgaaccccgccccattggcaccagatacctgactcgtaatctg

SEQ ID NO: 980 - protein, 736 aa, synthetic construct
  REGION 1..736: note = Adeno Associated Virus Capsid Protein Variant
MAADGYLPDWLEDNLSEGIREWWALKPGAPQPKANQQHQDNARGLVLPGYKYLGPGNGLDKGEPVNAADAAALEHDKAYDQQLKAGDNPYLKYNHADAEFQERLKEDTSFGGNLGRAVFQAKKRLLEPLGLVEEAAKTAPGKKRPVEQSPQEPDSSAGIGKSGAQPAKKRLNFGQTGDTESVPDPQPIGEPPAAPSGVGSLTMASGGGAPVADNNEGADGVGSSSGNWHCDSQWLGDRVITTSTRTWALPTYNNHLYKQISNSTSGGSSNDNAYFGYSTPWGYFDFNRFHCHFSPRDWQRLINNNWGFRPKRLNFKLFNIQVKEVTDNNGVKTIANNLTSTVQVFTDSDYQLPYVLGSAHEGCLPPFPADVFMIPQYGYLTLNDGSQAVGRSSFYCLEYFPSQMLRTGNNFQFSYEFENVPFHSSYAHSQSLDRLMNPLIDQYLYYLSKTINGSGQGQQTLKFSVAGPSGMAVQGRNYIPGPSYRQQRVSTTVTFNNNSEFAWPGASSWALNGRNSLMNPGPAMASHKEGEDRFFPLSGSLIFGKQGTGRDNVDADKVMITNEEEIKTTNPVATESYGQVATNHQSARAQAQTGWVQNQGILPGMVWQDRDVYLQGPIWAKIPHTDGNFHPSPLMGGFGMKHPPPQILIKNTPVPADPPTAFDKGKLNSFITQYSTGQVSVEIEWELQKENSKRWNPEIQYTSNYYKSNNVEFAVNTEGVYSEPRPIGTRYLTRNL

SEQ ID NO: 981 - DNA, 2208 bp, synthetic construct
  misc_feature 1..2208: note = Adeno Associated Virus Capsid Protein Variant
  source 1..2208: mol_type = other DNA
atggctgccgatggttatcttccagattggctcgaggacaaccttagtgaaggaattcgcgagtggtgggctttgaaacctggagcccctcaacccaaggcaaatcaacaacatcaagacaacgctcgaggtcttgtgcttccgggttacaaataccttggacccggcaacggactcgacaagggggagccggtcaacgcagcagacgcggcggccctcgagcacgacaaggcctacgaccagcagctcaaggccggagacaacccgtacctcaagtacaaccacgccgacgccgagttccaggagcggctcaaagaagatacgtcttttgggggcaacctcgggcgagcagtcttccaggccaaaaagaggcttcttgaacctcttggtctggttgaggaagcggctaagacggctcctggaaagaagaggcctgtagagcagtctcctcaggaaccggactcctccgcgggtattggcaaatcgggtgcacagcccgctaaaaagagactcaatttcggtcagactggcgacacagagtcagtcccagaccctcaaccaatcggagaacctcccgcagccccctcaggtgtgggatctcttacaatggcttcaggtggtggcgcaccagtggcagacaataacgaaggtgccgatggagtgggtagttcctcgggaaattggcattgcgattcccaatggctgggggacagagtcatcaccaccagcacccgaacctgggccctgcccacctacaacaatcacctctacaagagtatctccaacagcacatctggaggatcttcaaatgacaacgcctacttcggctacagcaccccctgggggtattttgacttcaacagattccactgccacttctcaccacgtgactggcagcgactcatcaacaacaactggggattccggcctaagcgactcaacttcaagctcttcaacattcaggtcaaagaggttacggacaacaatggagtcaagaccatcgccaataaccttaccagcacggtccaggtcttcacggactcagactatcagctcccgtacgtgctcgggtcggctcacgagggctgcctcccgccgttcccagcggacgttttcatgattcctcagtacgggtatctgacgcttaatgatggaagccaggccgtgggtcgttcgtccttttactgcctggaatatttcccgtcgcaaatgctaagaacgggtaacaacttccagttcagctacgagtttgagaacgtacctttccatagcagctacgctcacagccaaagcctggaccgactaatgaatccactcatcgaccaatacttgtactatctctcaaagactattaacggttctggacagggccaacaaacgctaaaattcagtgtgaccggacccagcaacatggctgtccagggaagaaactacatacctggacccagctaccgacaacaacgtgtctcaaccactgtgacttttaacaacaacagcgaatttgcttggcctggagcttcttcttgggctctcaatggacgtaatagcttgatgaatcctggacctgctatggccagccacaaagaaggagaggaccgtttctttcctttgtctggatctttaatttttggcaaacaaggaactggaagagacaacgtggatgcggacaaagtcatgataaccaacgaagaagaaattaaaactactaacccggtagcaacggagtcctatggacaagtggccacaaaccaccagagtgcccgggcacaggcgcagaccggctgggttcaaaaccaaggaatacttccgggtatggtttggcaggacagagatgtgtacctgcaaggacccatttgggccaaaattcctcacacggacggcaactttcacccttctccgctgatgggagggtttggaatgaagcacccgcctcctcagatcctcatcaaaaacacacctgtacctgcggatcctccaacggccttcaacaagggcaagctgaactctttcatcacccagtattctactggccaagtcagcgtggagatcgagtgggagctgcagaaggaaaacagcaagcgctggaacccggagatccagtacacttccaactattacaagtctaataatgttgaatttgctgttaatactgaaggtgtatatagtgaaccccgccccattggcaccagatacctgactcgtaatctg

SEQ ID NO: 982 - protein, 736 aa, synthetic construct
  REGION 1..736: note = Adeno Associated Virus Capsid Protein Variant
MAADGYLPDWLEDNLSEGIREWWALKPGAPQPKANQQHQDNARGLVLPGYKYLGPGNGLDKGEPVNAADAAALEHDKAYDQQLKAGDNPYLKYNHADAEFQERLKEDTSFGGNLGRAVFQAKKRLLEPLGLVEEAAKTAPGKKRPVEQSPQEPDSSAGIGKSGAQPAKKRLNFGQTGDTESVPDPQPIGEPPAAPSGVGSLTMASGGGAPVADNNEGADGVGSSSGNWHCDSQWLGDRVITTSTRTWALPTYNNHLYKSISNSTSGGSSNDNAYFGYSTPWGYFDFNRFHCHFSPRDWQRLINNNWGFRPKRLNFKLFNIQVKEVTDNNGVKTIANNLTSTVQVFTDSDYQLPYVLGSAHEGCLPPFPADVFMIPQYGYLTLNDGSQAVGRSSFYCLEYFPSQMLRTGNNFQFSYEFENVPFHSSYAHSQSLDRLMNPLIDQYLYYLSKTINGSGQGQQTLKFSVTGPSNMAVQGRNYIPGPSYRQQRVSTTVTFNNNSEFAWPGASSWALNGRNSLMNPGPAMASHKEGEDRFFPLSGSLIFGKQGTGRDNVDADKVMITNEEEIKTTNPVATESYGQVATNHQSARAQAQTGWVQNQGILPGMVWQDRDVYLQGPIWAKIPHTDGNFHPSPLMGGFGMKHPPPQILIKNTPVPADPPTAFNKGKLNSFITQYSTGQVSVEIEWELQKENSKRWNPEIQYTSNYYKSNNVEFAVNTEGVYSEPRPIGTRYLTRNL

SEQ ID NO: 983 - DNA, 2208 bp, synthetic construct
  misc_feature 1..2208: note = Adeno Associated Virus Capsid Protein Variant
  source 1..2208: mol_type = other DNA
atggctgccgatggttatcttccagattggctcgaggacaaccttagtgaaggaattcgcgagtggtgggctttgaaacctggagcccctcaacccaaggcaaatcaacaacatcaagacaacgctcgaggtcttgtgcttccgggttacaaataccttggacccggcaacggactcgacaagggggagccggtcaacgcagcagacgcggcggccctcgagcacgacaaggcctacgaccagcagctcaaggccggagacaacccgtacctcaagtacaaccacgccgacgccgaggcgcaggagcggctcaaagaagatacgtcttttgggggcaacctcgggcgagcagtcttccaggccaaaaagaggcttcttgaacctcttggtctggttgaggaagcggctaagacggctcctggaaagaagaggcctgtagagcagtctcctcaggaaccggactcctccgcgggtattggcaaatcgggtgcacagcccgctaaaaagagactcaatttcggtcagactggcgacacagagtcagtcccagaccctcaaccaatcggagaacctcccgcagccccctcaggtgtgggatctcttacaatggcttcaggtggtggcgcaccagtggcagacaataacgaaggtgccgatggagtgggtagttcctcgggaaattggcattgcgattcccaatggctgggggacagagtcatcaccaccagcacccgaacctgggccctgcccacctacaacaatcacctctacaagcaaatctccaacagcacatctggaggatcttcaaatgacaacgcctacttcggctacagcaccccctgggggtattttgacttcaacagattccactgccacttctcaccacgtgactggcagcgactcatcaacaacaactggggattccggcctaagcgactcaacttcaagctcttcaacattcaggtcaaagaggttacggacaacaatggagtcaagaccatcgccaataaccttaccagcacggtccaggtcttcacggactcagactatcagctcccgtacgtgctcgggtcggctcacgagggctgcctcccgccgttcccagcggacgttttcatgattcctcagtacgggtatctgacgcttaatgatggaagccaggccgtgggtcgttcgtccttttactgcctggaatatttcccgtcgcaaatgctaagaacgggtaacaacttccagttcagctacgagtttgagaacgtacctttccatagcagctacgctcacagccaaagcctggaccgactaatgaatccactcatcgaccaatacttgtactatctctcaaagactattaacggttctggacagggccaacaaacgctaaaattcagtgtggccggacccagcaacatggctgtccagggaagaaactacatacctggacccagctaccgacaacaacgtgtctcaaccactgtgacttttaacaacaacagcgaatttgcttggcctggagcttcttcttgggctctcaatggacgtaatagcttgatgaatcctggacctgctatggccagccacaaagaaggagaggaccgtttctttcctttgtctggatctttaatttttggcaaacaaggaactggaagagacaacgtggatgcggacaaagtcatgataaccaacgaagaagaaattaaaactactaacccggtagcaacggagtcctatggacaagtggccacaaaccaccagagtgcccgggcacaggcgcagaccggctgggttcaaaaccaaggaatacttccgggtatggtttggcaggacagagatgtgtacctgcaaggacccatttgggccaaaattcctcacacggacggcaactttcacccttctccgctgatgggagggtttggaatgaagcacccgcctcctcagatcctcatcaaaaacacacctgtacctgcggatcctccaacggccttcaacaagggcaagctgaactctttcatcacccagtattctactggccaagtcagcgtggagatcgagtgggagctgcagaaggaaaacagcaagcgctggaacccggagatccagtacacttccaactattacaagtctaataatgttgaatttgctgttaatactgaaggtgtatatagtgaaccccgccccattggcaccagatacctgactcgtaatctg

SEQ ID NO: 984 - protein, 736 aa, synthetic construct
  REGION 1..736: note = Adeno Associated Virus Capsid Protein Variant
MAADGYLPDWLEDNLSEGIREWWALKPGAPQPKANQQHQDNARGLVLPGYKYLGPGNGLDKGEPVNAADAAALEHDKAYDQQLKAGDNPYLKYNHADAEAQERLKEDTSFGGNLGRAVFQAKKRLLEPLGLVEEAAKTAPGKKRPVEQSPQEPDSSAGIGKSGAQPAKKRLNFGQTGDTESVPDPQPIGEPPAAPSGVGSLTMASGGGAPVADNNEGADGVGSSSGNWHCDSQWLGDRVITTSTRTWALPTYNNHLYKQISNSTSGGSSNDNAYFGYSTPWGYFDFNRFHCHFSPRDWQRLINNNWGFRPKRLNFKLFNIQVKEVTDNNGVKTIANNLTSTVQVFTDSDYQLPYVLGSAHEGCLPPFPADVFMIPQYGYLTLNDGSQAVGRSSFYCLEYFPSQMLRTGNNFQFSYEFENVPFHSSYAHSQSLDRLMNPLIDQYLYYLSKTINGSGQGQQTLKFSVAGPSNMAVQGRNYIPGPSYRQQRVSTTVTFNNNSEFAWPGASSWALNGRNSLMNPGPAMASHKEGEDRFFPLSGSLIFGKQGTGRDNVDADKVMITNEEEIKTTNPVATESYGQVATNHQSARAQAQTGWVQNQGILPGMVWQDRDVYLQGPIWAKIPHTDGNFHPSPLMGGFGMKHPPPQILIKNTPVPADPPTAFNKGKLNSFITQYSTGQVSVEIEWELQKENSKRWNPEIQYTSNYYKSNNVEFAVNTEGVYSEPRPIGTRYLTRNL

SEQ ID NO: 985 - DNA, 2208 bp, synthetic construct
  misc_feature 1..2208: note = Adeno Associated Virus Capsid Protein Variant
  source 1..2208: mol_type = other DNA
atggctgccgatggttatcttccagattggctcgaggacaaccttagtgaaggaattcgcgagtggtgggctttgaaacctggagcccctcaacccaaggcaaatcaacaacatcaagacaacgctcgaggtcttgtgcttccgggttacaaataccttggacccggcaacggactcgacaagggggagccggtcaacgcagcagacgcggcggccctcgagcacgacaaggcctacgaccagcagctcaaggccggagacaacccgtacctcaagtacaaccacgccgacgccgagttccaggagcggctcaaagaagatacgtcttttgggggcaacctcgggcgagcagtcttccaggccaaaaagaggcttcttgaacctcttggtctggttgaggaagcggctaagacggctcctggaaagaagaggcctgtagagcagtctcctcaggaaccggactcctccgcgggtattggcaaatcgggtgcacagcccgctaaaaagagactcaatttcggtcagactggcgacacagagtcagtcccagaccctcaaccaatcggagaacctcccgcagccccctcaggtgtgggatctcttacaatggcttcaggtggtggcgcaccagtggcagacaataacgaaggtgccgatggagtgggtagttcctcgggaaattggcattgcgattcccaatggctgggggacagagtcatcaccaccagcacccgaacctgggccctgcccacctacaacaatcacctctacaagcaaatctccaacagcacatctggaggatcttcaaatgacaacgcctacttcggctacagcaccccctgggggtattttgacttcaacagattccactgccacttctcaccacgtgactggcagcgactcatcaacaacaactggggattccggcctaagcgactcaacttcaagctcttcaacattcaggtcaaagaggttacggacaacaatggagtcaagaccatcgccaataaccttaccagcacggtccaggtcttcacggactcagactatcagctcccgtacgtgctcgggtcggctcacgagggctgcctcccgccgttcccagcggacgttttcatgattcctcagtacgggtatctgacgcttaatgatggaagccaggccgtgggtcgttcgtccttttactgcctggaatatttcccgtcgcaaatgctaagaacgggtaacaacttccagttcaggtacgagtttgagaacgtacctttccatagcagctacgctcacagccaaagcctggaccgactaatgaatccactcatcgaccaatacttgtactatctctcaaagactattaacggttctggacagggccaacaaacgctaaaattcagtgtggccggacccagcaacatggctgtccagggaagaaactacatacctggacccagctaccgacaacaacgtgtctcaaccactgtgacttttaacaacaacagcgaatttgcttggcctggagcttcttcttgggctctcaatggacgtaatagcttgatgaatcctggacctgctatggccagccacaaagaaggagaggaccgtttctttcctttgtctggatctttaatttttggcaaacaaggaactggaagagacaacgtggatgcggacaaagtcatgataaccaacgaagaagaaattaaaactactaacccggtagcaacggagtcctatggacaagtggccacaaaccaccagagtgcccgggcacaggcgcagaccggctgggttcaaaaccaaggaatacttccgggtatggtttggcaggacagagatgtgtacctgcaaggacccatttgggccaaaattcctcacacggacggcaactttcacccttctccgctgatgggagggtttggaatgaagcacccgcctcctcagatcctcatcaaaaacacacctgtacctgcggatcctccaacggccttcaacaagggcaagctgaactctttcatcacccagtattctactggccaagtcagcgtggagatcgagtgggagctgcagaaggaaaacagcaagcgctggaacccggagatccagtacacttccaactattacaagtctaataatgttgaatttgctgttaatactgaaggtgtatatagtgaaccccgccccattggcaccagatacctgactcgtaatctg

SEQ ID NO: 986 - protein, 736 aa, synthetic construct
  REGION 1..736: note = Adeno Associated Virus Capsid Protein Variant
MAADGYLPDWLEDNLSEGIREWWALKPGAPQPKANQQHQDNARGLVLPGYKYLGPGNGLDKGEPVNAADAAALEHDKAYDQQLKAGDNPYLKYNHADAEFQERLKEDTSFGGNLGRAVFQAKKRLLEPLGLVEEAAKTAPGKKRPVEQSPQEPDSSAGIGKSGAQPAKKRLNFGQTGDTESVPDPQPIGEPPAAPSGVGSLTMASGGGAPVADNNEGADGVGSSSGNWHCDSQWLGDRVITTSTRTWALPTYNNHLYKQISNSTSGGSSNDNAYFGYSTPWGYFDFNRFHCHFSPRDWQRLINNNWGFRPKRLNFKLFNIQVKEVTDNNGVKTIANNLTSTVQVFTDSDYQLPYVLGSAHEGCLPPFPADVFMIPQYGYLTLNDGSQAVGRSSFYCLEYFPSQMLRTGNNFQFRYEFENVPFHSSYAHSQSLDRLMNPLIDQYLYYLSKTINGSGQGQQTLKFSVAGPSNMAVQGRNYIPGPSYRQQRVSTTVTFNNNSEFAWPGASSWALNGRNSLMNPGPAMASHKEGEDRFFPLSGSLIFGKQGTGRDNVDADKVMITNEEEIKTTNPVATESYGQVATNHQSARAQAQTGWVQNQGILPGMVWQDRDVYLQGPIWAKIPHTDGNFHPSPLMGGFGMKHPPPQILIKNTPVPADPPTAFNKGKLNSFITQYSTGQVSVEIEWELQKENSKRWNPEIQYTSNYYKSNNVEFAVNTEGVYSEPRPIGTRYLTRNL

SEQ ID NO: 987 - DNA, 2208 bp, synthetic construct
  misc_feature 1..2208: note = Adeno Associated Virus Capsid Protein Variant
  source 1..2208: mol_type = other DNA
atggctgccgatggttatcttccagattggctcgaggacaaccttagtgaaggaattcgcgagtggtgggctttgaaacctggagcccctcaacccaaggcaaatcaacaacatcaagacaacgctcgaggtcttgtgcttccgggttacaaataccttggacccggcaacggactcgacaagggggagccggtcaacgcagcagacgcggcggccctcgagcacgacaaggcctacgaccagcagctcaaggccggagacaacccgtacctcaagtacaaccacgccgacgccgagttccaggagcggctcaaagaagatacgtcttttgggggcaacctcgggcgagcagtcttccaggccaaaaagaggcttcttgaacctcttggtctggttgaggaagcggctaagacggctcctggaaagaagaggcctgtagagcagtctcctcaggaaccggactcctccgcgggtattggcaaatcgggtgcacagcccgctaaaaagagactcaatttcggtcagactggcgacacagagtcagtcccagaccctcaaccaatcggagaacctcccgcagccccctcaggtgtgggatctcttacaatggcttcaggtggtggcgcaccagtggcagacaataacgaaggtgccgatggagtgggtagttcctcgggaaattggcattgcgattcccaatggctgggggacagagtcatcaccaccagcacccgaacctgggccctgcccacctacaacaatcacctctacaagcaaatctccaacagcacatctggaggatcttcaaatgacaacgcctacttcggctacagcaccccctgggggtattttgacttcaacagattccactgccacttctcaccacgtgactggcagcgactcatcaacaacaactggggattccggcctaagcgactcaacttcaagctcttcaacattcaggtcaaagaggttacggacaacaatggaaccaagaccatcgccaataaccttaccagcacggtccaggtcttcacggactcagactatcagctcccgtacgtgctcgggtcggctcacgagggctgcctcccgccgttcccagcggacgttttcatgattcctcagtacgggtatctgacgcttaatgatggaagccaggccgtgggtcgttcgtccttttactgcctggaatatttcccgtcgcaaatgctaagaacgggtaacaacttccagttcagctacgagtttgagaacgtacctttccatagcagctacgctcacagccaaagcctggaccgactaatgaatccactcatcgaccaatacttgtactatctctcaaagactattaacggttctggacagggccaacaaacgctaaaattcagtgtggccggacccagcaacatggctgtccagggaagaaactacatacctggacccagctaccgacaacaacgtgtctcaaccactgtgacttttaacaacaacagcgaatttgcttggcctggagcttcttcttgggctctcaatggacgtaatagcttgatgaatcctggacctgctatggccagccacaaagaaggagaggaccgtttctttcctttgtctggatctttaatttttggcaaacaaggaactggaagagacaacgtggatgcggacaaagtcatgataaccaacgaagaagaaattaaaactactaacccggtagcaacggagtcctatggacaagtggccacaaaccaccagagtgcccgggcacaggcgcagaccggctgggttcaaaaccaaggaatacttccgggtatggtttggcaggacagagatgtgtacctgcaaggacccatttgggccaaaattcctcacacggacggcaactttcacccttctccgctgatgggagggtttggaatgaagcacccgcctcctcagatcctcatcaaaaacacacctgtacctgcggatcctccaacggccttcaacaagggcaagctgaactctttcatcacccagtattctactggccaagtcagcgtggagatcgagtgggagctgcagaaggaaaacagcaagcgctggaacccggagatccagtacacttccaactattacaagtctaataatgttgaatttgctgttaatactgaaggtgtatatagtgaaccccgccccattggcaccagatacctgactcgtaatctg

SEQ ID NO: 988 - protein, 736 aa, synthetic construct; identical to SEQ ID NO: 866
  REGION 1..736: note = Adeno Associated Virus Capsid Protein Variant

SEQ ID NO: 989 - DNA, 2208 bp, synthetic construct
  misc_feature 1..2208: note = Adeno Associated Virus Capsid Protein Variant
  source 1..2208: mol_type = other DNA
atggctgccgatggttatcttccagattggctcgaggacaaccttagtgaaggaattcgcgagtggtgggctttgaaacctggagcccctcaacccaaggcaaatcaacaacatcaagacaacgctcgaggtcttgtgcttccgggttacaaataccttggacccggcaacggactcgacaagggggagccggtcaacgcagcagacgcggcggccctcgagcacgacaaggcctacgaccagcagctcaaggccggagacaacccgcttctcaagtacaaccacgccgacgccgagttccaggagcggctcaaagaagatacgtcttttgggggcaacctcgggcgagcagtcttccaggccaaaaagaggcttcttgaacctcttggtctggttgaggaagcggctaagacggctcctggaaagaagaggcctgtagagcagtctcctcaggaaccggactcctccgcgggtattggcaaatcgggtgcacagcccgctaaaaagagactcaatttcggtcagactggcgacacagagtcagtcccagaccctcaaccaatcggagaacctcccgcagccccctcaggtgtgggatctcttacaatggcttcaggtggtggcgcaccagtggcagacaataacgaaggtgccgatggagtgggtagttcctcgggaaattggcattgcgattcccaatggctgggggacagagtcatcaccaccagcacccgaacctgggccctgcccacctacaacaatcacctctacaagcaaatctccaacagcacatctggaggatcttcaaatgacaacgcctacttcggctacagcaccccctgggggtattttgacttcaacagattccactgccacttctcaccacgtgactggcagcgactcatcaacaacaactggggattccggcctaagcgactcaacttcaagctcttcaacattcaggtcaaagaggttacggacaacaatggagtcaagaccatcgccaataaccttaccagcacggtccaggtcttcacggactcagactatcagctcccgtacgtgctcgggtcggctcacgagggctgcctcccgccgttcccagcggacgttttcatgattcctcagtacgggtatctgacgcttaatgatggaagccaggccgtgggtcgttcgtccttttactgcctggaatatttcccgtcgcaaatgctaagaacgggtaacaacttccagttcagctacgagtttgagaacgtacctttccatagcagctacgctcacagccaaagcctggaccgactaatgaatccactcatcgaccaatacttgtactatctctcaaagactattaacggttctggacagggccaacaaacgctaaaattcagtgtggccggacccagcaacatggctgtccagggaagaaactacatacctggacccagctaccgacaacaacgtgtctcaaccactgtgacttttaacaacaacagcgaatttgcttggcctggagcttcttcttgggctctcaatggacgtaatagcttgatgaatcctggacctgctatggccagccacaaagaaggagaggaccgtttctttcctttgtctggatctttaatttttggcaaacaaggaactggaagagacaacgtggatgcggacaaagtcatgataaccaacgaagaagaaattaaaactactaacccggtagcaacggagtcctatggacaagtggccacaaaccaccagagtgcccgggcacaggcgcagaccggctgggttcaaaaccaaggaatacttccgggtatggtttggcaggacagagatgtgtacctgcaaggacccatttgggccaaaattcctcacacggacggcaactttcacccttctccgctgatgggagggtttggaatgaagcacccgcctcctcagatcctcatcaaaaacacacctgtacctgcggatcctccaacggccttcaacaagggcaagctgaactctttcatcacccagtattctactggccaagtcagcgtggagatcgagtgggagctgcagaaggaaaacagcaagcgctggaacccggagatccagtacacttccaactattacaagtctaataatgttgaatttgctgttaatactgaaggtgtatatagtgaaccccgccccattggcaccagatacctgactcgtaatctg

SEQ ID NO: 990 - protein, 736 aa, synthetic construct
  REGION 1..736: note = Adeno Associated Virus Capsid Protein Variant
MAADGYLPDWLEDNLSEGIREWWALKPGAPQPKANQQHQDNARGLVLPGYKYLGPGNGLDKGEPVNAADAAALEHDKAYDQQLKAGDNPLLKYNHADAEFQERLKEDTSFGGNLGRAVFQAKKRLLEPLGLVEEAAKTAPGKKRPVEQSPQEPDSSAGIGKSGAQPAKKRLNFGQTGDTESVPDPQPIGEPPAAPSGVGSLTMASGGGAPVADNNEGADGVGSSSGNWHCDSQWLGDRVITTSTRTWALPTYNNHLYKQISNSTSGGSSNDNAYFGYSTPWGYFDFNRFHCHFSPRDWQRLINNNWGFRPKRLNFKLFNIQVKEVTDNNGVKTIANNLTSTVQVFTDSDYQLPYVLGSAHEGCLPPFPADVFMIPQYGYLTLNDGSQAVGRSSFYCLEYFPSQMLRTGNNFQFSYEFENVPFHSSYAHSQSLDRLMNPLIDQYLYYLSKTINGSGQGQQTLKFSVAGPSNMAVQGRNYIPGPSYRQQRVSTTVTFNNNSEFAWPGASSWALNGRNSLMNPGPAMASHKEGEDRFFPLSGSLIFGKQGTGRDNVDADKVMITNEEEIKTTNPVATESYGQVATNHQSARAQAQTGWVQNQGILPGMVWQDRDVYLQGPIWAKIPHTDGNFHPSPLMGGFGMKHPPPQILIKNTPVPADPPTAFNKGKLNSFITQYSTGQVSVEIEWELQKENSKRWNPEIQYTSNYYKSNNVEFAVNTEGVYSEPRPIGTRYLTRNL

SEQ ID NO: 991 - DNA, 2208 bp, synthetic construct
  misc_feature 1..2208: note = Adeno Associated Virus Capsid Protein Variant
  source 1..2208: mol_type = other DNA
atggctgccgatggttatcttccagattggctcgaggacaaccttagtgaaggaattcgcgagtggtgggctttgaaacctggagcccctcaacccaaggcaaatcaacaacatcaagacaacgctcgaggtcttgtgcttccgggttacaaataccttggacccggcaacggactcgacaagggggagccggtcaacgcagcagacgcggcggccctcgagcacgacaaggcctacgaccagcagctcaaggccggagacaacccgtacctcaagtacaaccacgccgacgccgagttccaggagcggctcaaagaagatacgtcttttgggggcaacctcgggcgagcagtcttccaggccaaaaagaggcttcttgaacctcttggtctggttgaggaagcggctaagacggctcctggaaagaagaggcctgtagagcagtctcctcaggaaccggactcctccgcgggtattggcaaatcgggtgcacagcccgctaaaaagagactcaatttcggtcagactggcgacacagagtcagtcccagaccctcaaccaatcggacaccctcccgcagccccctcaggtgtgggatctcttacaatggcttcaggtggtggcgcaccagtggcagacaataacgaaggtgccgatggagtgggtagttcctcgggaaattggcattgcgattcccaatggctgggggacagagtcatcaccaccagcacccgaacctgggccctgcccacctacaacaatcacctctacaagcaaatctccaacagcacatctggaggatcttcaaatgacaacgcctacttcggctacagcaccccctgggggtattttgacttcaacagattccactgccacttctcaccacgtgactggcagcgactcatcaacaacaactggggattccggcctaagcgactcaacttcaagctcttcaacattcaggtcaaagaggttacggacaacaatggagtcaagaccatcgccaataaccttaccagcacggtccaggtcttcacggactcagactatcagctcccgtacgtgctcgggtcggctcacgagggctgcctcccgccgttcccagcggacgttttcatgattcctcagtacgggtatctgacgcttaatgatggaagccaggccgtgggtcgttcgtccttttactgcctggaatatttcccgtcgcaaatgctaagaacgggtaacaacttccagttcagctacgagtttgagaacgtacctttccatagcagctacgctcacagccaaagcctggaccgactaatgaatccactcatcgaccaatacttgtactatctctcaaagactattaacggttctggacagggccaacaaacgctaaaattcagtgtggccggacccagcaacatggctgtccagggaagaaactacatacctggacccagctaccgacaacaacgtgtctcaaccactgtgacttttaacaacaacagcgaatttgcttggcctggagcttcttcttgggctctcaatggacgtaatagcttgatgaatcctggacctgctatggccagccacaaagaaggagaggaccgtttctttcctttgtctggatctttaatttttggcaaacaaggaactggaagagacaacgtggatgcggacaaagtcatgataaccaacgaagaagaaattaaaactactaacccggtagcaacggagtcctatggacaagtggccacaaaccaccagagtgcccgggcacaggcgcagaccggctgggttcaaaaccaaggaatacttccgggtatggtttggcaggacagagatgtgtacctgcaaggacccatttgggccaaaattcctcacacggacggcaactttcacccttctccgctgatgggagggtttggaatgaagcacccgcctcctcagatcctcatcaaaaacacacctgtacctgcggatcctccaacggccttcaacaagggcaagctgaactctttcatcacccagtattctactggccaagtcagcgtggagatcgagtgggagctgcagaaggaaaacagcaagcgctggaacccggagatccagtacacttccaactattacaagtctaataatgttgaatttgctgttaatactgaaggtgtatatagtgaaccccgccccattggcaccagatacctgactcgtaatctg

SEQ ID NO: 992 - protein, 736 aa, synthetic construct
  REGION 1..736: note = Adeno Associated Virus Capsid Protein Variant
MAADGYLPDWLEDNLSEGIREWWALKPGAPQPKANQQHQDNARGLVLPGYKYLGPGNGLDKGEPVNAADAAALEHDKAYDQQLKAGDNPYLKYNHADAEFQERLKEDTSFGGNLGRAVFQAKKRLLEPLGLVEEAAKTAPGKKRPVEQSPQEPDSSAGIGKSGAQPAKKRLNFGQTGDTESVPDPQPIGHPPAAPSGVGSLTMASGGGAPVADNNEGADGVGSSSGNWHCDSQWLGDRVITTSTRTWALPTYNNHLYKQISNSTSGGSSNDNAYFGYSTPWGYFDFNRFHCHFSPRDWQRLINNNWGFRPKRLNFKLFNIQVKEVTDNNGVKTIANNLTSTVQVFTDSDYQLPYVLGSAHEGCLPPFPADVFMIPQYGYLTLNDGSQAVGRSSFYCLEYFPSQMLRTGNNFQFSYEFENVPFHSSYAHSQSLDRLMNPLIDQYLYYLSKTINGSGQGQQTLKFSVAGPSNMAVQGRNYIPGPSYRQQRVSTTVTFNNNSEFAWPGASSWALNGRNSLMNPGPAMASHKEGEDRFFPLSGSLIFGKQGTGRDNVDADKVMITNEEEIKTTNPVATESYGQVATNHQSARAQAQTGWVQNQGILPGMVWQDRDVYLQGPIWAKIPHTDGNFHPSPLMGGFGMKHPPPQILIKNTPVPADPPTAFNKGKLNSFITQYSTGQVSVEIEWELQKENSKRWNPEIQYTSNYYKSNNVEFAVNTEGVYSEPRPIGTRYLTRNL

SEQ ID NO: 993 - DNA, 2208 bp, synthetic construct
  misc_feature 1..2208: note = Adeno Associated Virus Capsid Protein Variant
  source 1..2208: mol_type = other DNA
atggctgccgatggttatcttccagattggctcgaggacaaccttagtgaaggaattcgcgagtggtgggctttgaaacctggagcccctcaacccaaggcaaatcaacaacatcaagacaacgctcgaggtcttgtgcttccgggttacaaataccttggacccggcaacggactcgacaagggggagccggtcaacgcagcagacgcggcggccctcgagcacgacaaggcctacgaccagcagctcaaggccggagacaacccgtacctcaagtacaaccacgccgacgccgagttccaggagcggctcaaagaagatacgtcttttgggggcaacctcgggcgagcagtcttccaggccaaaaagaggcttcttgaacctcttggtctggttgaggaagcggctaagacggctcctggaaagaagaggcctgtagagcagtctcctcaggaaccggactcctccgcgggtattggcaaatcgggtgcacagcccgctaaaaagagactcaatttcggtcagactggcgacacagagtcagtcccagaccctcaaccaatcggagaacctcccgcagccccctcaggtgtgggatctcttacaatggcttcaggtggtggcgcaccagtggcagacaataacgaaggtgccgatggagtgggtagttcctcgggaaattggcattgcgattcccaatggctgggggacagagtcatcaccaccagcacccgaacctgggccctgcccacctacaacaatcacctctacaagcaaatctccaacagcacatctggaggatcttcaaatgacaacgcctacttcggctacagcaccccctgggggtattttgacttcaacagattccactgccacttctcaccacgtgactggcagcgactcatcaacaacaactggggattccggcctaagcgactcaacttcaagctcttcaacattcaggtcaaagaggttacggacaacaatggagtcaagaccatcgccaataaccttaccagcacggtccaggtcttcacggactcagactatcagctcccgtacgtgctcgggtcggctcacgagggctgcctcccgccgttcccagcggacgttttcatgattcctcagtacgggtatctgacgcttaatgatggaagccaggccgtgggtcgttcgtccttttactgcctggaatatttcccgtcgcaaatgctaagaacgggtaacaacttccagttcagctacgagtttgagaacgtacctttccatagcagctacgctcacagccaaagcctggaccgactaatgaatccactcatcgaccaatacttgtactatctctcaaagactattaacggttctggacagggccaacaaacgctaaaattcagtgtggccggacccagcaacatggctgtccagggaagaaactacatacctggacccagctaccgacaacaacgtgtctcaaccactgtgacttttaacaacaacagcgaatttgcttggcctggagcttcttcttgggctctcaatggacgtaatagcttgatgaatcctggacctgctatggccagccacaaagaaggagaggaccgtttctttcctttgtctggatctttaatttttggcaaacaaggaactggaagagacaacgtggatgcggacaaagtcatgataaccaacgaagaagaaattaaaactactaacccggtagcaacggagtcctatggacaagtggccacaaaccaccagagtgcccgggcacaggcgcagaccggctgggtttgtaaccaaggaatacttccgggtatggtttggcaggacagagatgtgtacctgcaaggacccatttgggccaaaattcctcacacggacggcaactttcacccttctccgctgatgggagggtttggaatgaagcacccgcctcctcagatcctcatcaaaaacacacctgtacctgcggatcctccaacggccttcaacaagggcaagctgaactctttcatcacccagtattctactggccaagtcagcgtggagatcgagtgggagctgcagaaggaaaacagcaagcgctggaacccggagatccagtacacttccaactattacaagtctaataatgttgaatttgctgttaatactgaaggtgtatatagtgaaccccgccccattggcaccagatacctgactcgtaatctg

SEQ ID NO: 994 - protein, 736 aa, synthetic construct
  REGION 1..736: note = Adeno Associated Virus Capsid Protein Variant
MAADGYLPDWLEDNLSEGIREWWALKPGAPQPKANQQHQDNARGLVLPGYKYLGPGNGLDKGEPVNAADAAALEHDKAYDQQLKAGDNPYLKYNHADAEFQERLKEDTSFGGNLGRAVFQAKKRLLEPLGLVEEAAKTAPGKKRPVEQSPQEPDSSAGIGKSGAQPAKKRLNFGQTGDTESVPDPQPIGEPPAAPSGVGSLTMASGGGAPVADNNEGADGVGSSSGNWHCDSQWLGDRVITTSTRTWALPTYNNHLYKQISNSTSGGSSNDNAYFGYSTPWGYFDFNRFHCHFSPRDWQRLINNNWGFRPKRLNFKLFNIQVKEVTDNNGVKTIANNLTSTVQVFTDSDYQLPYVLGSAHEGCLPPFPADVFMIPQYGYLTLNDGSQAVGRSSFYCLEYFPSQMLRTGNNFQFSYEFENVPFHSSYAHSQSLDRLMNPLIDQYLYYLSKTINGSGQGQQTLKFSVAGPSNMAVQGRNYIPGPSYRQQRVSTTVTFNNNSEFAWPGASSWALNGRNSLMNPGPAMASHKEGEDRFFPLSGSLIFGKQGTGRDNVDADKVMITNEEEIKTTNPVATESYGQVATNHQSARAQAQTGWVCNQGILPGMVWQDRDVYLQGPIWAKIPHTDGNFHPSPLMGGFGMKHPPPQILIKNTPVPADPPTAFNKGKLNSFITQYSTGQVSVEIEWELQKENSKRWNPEIQYTSNYYKSNNVEFAVNTEGVYSEPRPIGTRYLTRNL

SEQ ID NO: 995 - DNA, 2208 bp, synthetic construct
  misc_feature 1..2208: note = Adeno Associated Virus Capsid Protein Variant
  source 1..2208: mol_type = other DNA
atggctgccgatggttatcttccagattggctcgaggacaaccttagtgaaggaattcgcgagtggtgggctttgaaacctggagcccctcaacccaaggcaaatcaacaacatcaagacaacgctcgaggtcttgtgcttccgggttacaaataccttggacccggcaacggactcgacaagggggagccggtcaacgcagcagacgcggcggccctcgagcacgacaaggcctacgaccagcagctcaaggccggagacaacccgtacctcaagtacaaccacgccgacgccgagttccaggagcggctcaaagaagatacgtcttttgggggcaacctcgggcgagcagtcttccaggccaaaaagaggcttcttgaacctcttggtctggttgaggaagcggctaagacggctcctggaaagaagaggcctgtagagcagtctcctcaggaaccggactcctccgcgggtattggcaaatcgggtgcacagcccgctaaaaagagactcaatttcggtcagactggcgacacagagtcagtcccagaccctcaaccaatcggagaacctcccgcagccccctcaggtgtgggatctcttacaatggcttcaggtggtggcgcaccagtggcagacaataacgaaggtgccgatggagtgggtagttcctcgggaaattggcattgcgattcccaatggctgggggacagagtcatcaccaccagcacccgaacctgggccctgcccacctacaacaatcacctctacaagcaaatctccaacagcacatctggaggatcttcaaatgacaacgcctacttcggctacagcaccccctgggggtattttgacttcaacagattccactgccacttctcaccacgtgactggcagcgactcatcaacaacaactggggattccggcctaagcgactcaacttcaagctcttcaacattcaggtcaaagaggttacggacaacaatggagtcaaggcgatcgccaataaccttaccagcacggtccaggtcttcacggactcagactatcagctcccgtacgtgctcgggtcggctcacgagggctgcctcccgccgttcccagcggacgttttcatgattcctcagtacgggtatctgacgcttaatgatggaagccaggccgtgggtcgttcgtccttttactgcctggaatatttcccgtcgcaaatgctaagaacgggtaacaacttccagttcagctacgagtttgagaacgtacctttccatagcagctacgctcacagccaaagcctggaccgactaatgaatccactcatcgaccaatacttgtactatctctcaaagactattaacggttctggacagggccaacaaacgctaaaattcagtgtggccggacccagcaacatggctgtccagggaagaaactacatacctggacccagctaccgacaacaacgtgtctcaaccactgtgacttttaacaacaacagcgaatttgcttggcctggagcttcttcttgggctctcaatggacgtaatagcttgatgaatcctggacctgctatggccagccacaaagaaggagaggaccgtttctttcctttgtctggatctttaatttttggcaaacaaggaactggaagagacaacgtggatgcggacaaagtcatgataaccaacgaagaagaaattaaaactactaacccggtagcaacggagtcctatggacaagtggccacaaaccaccagagtgcccgggcacaggcgcagaccggctgggttcaaaaccaaggaatacttccgggtatggtttggcaggacagagatgtgtacctgcaaggacccatttgggccaaaattcctcacacggacggcaactttcacccttctccgctgatgggagggtttggaatgaagcacccgcctcctcagatcctcatcaaaaacacacctgtacctgcggatcctccaacggccttcaacaagggcaagctgaactctttcatcacccagtattctactggccaagtcagcgtggagatcgagtgggagctgcagaaggaaaacagcaagcgctggaacccggagatccagtacacttccaactattacaagtctaataatgttgaatttgctgttaatactgaaggtgtatatagtgaaccccgccccattggcaccagatacctgactcgtaatctg

SEQ ID NO: 996 - protein, 736 aa, synthetic construct
  REGION 1..736: note = Adeno Associated Virus Capsid Protein Variant
MAADGYLPDWLEDNLSEGIREWWALKPGAPQPKANQQHQDNARGLVLPGYKYLGPGNGLDKGEPVNAADAAALEHDKAYDQQLKAGDNPYLKYNHADAEFQERLKEDTSFGGNLGRAVFQAKKRLLEPLGLVEEAAKTAPGKKRPVEQSPQEPDSSAGIGKSGAQPAKKRLNFGQTGDTESVPDPQPIGEPPAAPSGVGSLTMASGGGAPVADNNEGADGVGSSSGNWHCDSQWLGDRVITTSTRTWALPTYNNHLYKQISNSTSGGSSNDNAYFGYSTPWGYFDFNRFHCHFSPRDWQRLINNNWGFRPKRLNFKLFNIQVKEVTDNNGVKAIANNLTSTVQVFTDSDYQLPYVLGSAHEGCLPPFPADVFMIPQYGYLTLNDGSQAVGRSSFYCLEYFPSQMLRTGNNFQFSYEFENVPFHSSYAHSQSLDRLMNPLIDQYLYYLSKTINGSGQGQQTLKFSVAGPSNMAVQGRNYIPGPSYRQQRVSTTVTFNNNSEFAWPGASSWALNGRNSLMNPGPAMASHKEGEDRFFPLSGSLIFGKQGTGRDNVDADKVMITNEEEIKTTNPVATESYGQVATNHQSARAQAQTGWVQNQGILPGMVWQDRDVYLQGPIWAKIPHTDGNFHPSPLMGGFGMKHPPPQILIKNTPVPADPPTAFNKGKLNSFITQYSTGQVSVEIEWELQKENSKRWNPEIQYTSNYYKSNNVEFAVNTEGVYSEPRPIGTRYLTRNL

SEQ ID NO: 997 - DNA, 2208 bp, synthetic construct
  misc_feature 1..2208: note = Adeno Associated Virus Capsid Protein Variant
  source 1..2208: mol_type = other DNA
atggctgccgatggttatcttccagattggctcgaggacaaccttagtgaaggaattcgcgagtggtgggctttgaaacctggagcccctcaacccaaggcaaatcaacaacatcaagacaacgctcgaggtcttgtgcttccgggttacaaataccttggacccggcaacggactcgacaagggggagccggtcaacgcagcagacgcggcggccctcgagcacgacaaggcctacgaccagcagctcaaggccggagacaacccgggtctcaagtacaaccacgccgacgccgagttccaggagcggctcaaagaagatacgtcttttgggggcaacctcgggcgagcagtcttccaggccaaaaagaggcttcttgaacctcttggtctggttgaggaagcggctaagacggctcctggaaagaagaggcctgtagagcagtctcctcaggaaccggactcctccgcgggtattggcaaatcgggtgcacagcccgctaaaaagagactcaatttcggtcagactggcgacacagagtcagtcccagaccctcaaccaatcggagaacctcccgcagccccctcaggtgtgggatctcttacaatggcttcaggtggtggcgcaccagtggcagacaataacgaaggtgccgatggagtgggtagttcctcgggaaattggcattgcgattcccaatggctgggggacagagtcatcaccaccagcacccgaacctgggccctgcccacctacaacaatcacctctacaagcaaatctccaacagcacatctggaggatcttcaaatgacaacgcctacttcggctacagcaccccctgggggtattttgacttcaacagattccactgccacttctcaccacgtgactggcagcgactcatcaacaacaactggggattccggcctaagcgactcaacttcaagctcttcaacattcaggtcaaagaggttacggacaacaatggagtcaagaccatcgccaataaccttaccagcacggtccaggtcttcacggactcagactatcagctcccgtacgtgctcgggtcggctcacgagggctgcctcccgccgttcccagcggacgttttcatgattcctcagtacgggtatctgacgcttaatgatggaagccaggccgtgggtcgttcgtccttttactgcctggaatatttcccgtcgcaaatgctaagaacgggtaacaacttccagttcagctacgagtttgagaacgtacctttccatagcagctacgctcacagccaaagcctggaccgactaatgaatccactcatcgaccaatacttgtactatctctcaaagactattaacggttctggacagggccaacaaacgctaaaattcagtgtggccggacccagcaacatggctgtccagggaagaaactacatacctggacccagctaccgacaacaacgtgtctcaaccactgtgacttttaacaacaacagcgaatttgcttggcctggagcttcttcttgggctctcaatggacgtaatagcttgatgaatcctggacctgctatggccagccacaaagaaggagaggaccgtttctttcctttgtctggatctttaatttttggcaaacaaggaactggaagagacaacgtggatgcggacaaagtcatgataaccaacgaagaagaaattaaaactactaacccggtagcaacggagtcctatggacaagtggccacaaaccaccagagtgcccgggcacaggcgcagaccggctgggttcaaaaccaaggaatacttccgggtatggtttggcaggacagagatgtgtacctgcaaggacccatttgggccaaaattcctcacacggacggcaactttcacccttctccgctgatgggagggtttggaatgaagcacccgcctcctcagatcctcatcaaaaacacacctgtacctgcggatcctccaacggccttcaacaagggcaagctgaactctttcatcacccagtattctactggccaagtcagcgtggagatcgagtgggagctgcagaaggaaaacagcaagcgctggaacccggagatccagtacacttccaactattacaagtctaataatgttgaatttgctgttaatactgaaggtgtatatagtgaaccccgccccattggcaccagatacctgactcgtaatctg

SEQ ID NO: 998 - protein, 736 aa, synthetic construct
  REGION 1..736: note = Adeno Associated Virus Capsid Protein Variant
MAADGYLPDWLEDNLSEGIREWWALKPGAPQPKANQQHQDNARGLVLPGYKYLGPGNGLDKGEPVNAADAAALEHDKAYDQQLKAGDNPGLKYNHADAEFQERLKEDTSFGGNLGRAVFQAKKRLLEPLGLVEEAAKTAPGKKRPVEQSPQEPDSSAGIGKSGAQPAKKRLNFGQTGDTESVPDPQPIGEPPAAPSGVGSLTMASGGGAPVADNNEGADGVGSSSGNWHCDSQWLGDRVITTSTRTWALPTYNNHLYKQISNSTSGGSSNDNAYFGYSTPWGYFDFNRFHCHFSPRDWQRLINNNWGFRPKRLNFKLFNIQVKEVTDNNGVKTIANNLTSTVQVFTDSDYQLPYVLGSAHEGCLPPFPADVFMIPQYGYLTLNDGSQAVGRSSFYCLEYFPSQMLRTGNNFQFSYEFENVPFHSSYAHSQSLDRLMNPLIDQYLYYLSKTINGSGQGQQTLKFSVAGPSNMAVQGRNYIPGPSYRQQRVSTTVTFNNNSEFAWPGASSWALNGRNSLMNPGPAMASHKEGEDRFFPLSGSLIFGKQGTGRDNVDADKVMITNEEEIKTTNPVATESYGQVATNHQSARAQAQTGWVQNQGILPGMVWQDRDVYLQGPIWAKIPHTDGNFHPSPLMGGFGMKHPPPQILIKNTPVPADPPTAFNKGKLNSFITQYSTGQVSVEIEWELQKENSKRWNPEIQYTSNYYKSNNVEFAVNTEGVYSEPRPIGTRYLTRNL

SEQ ID NO: 999 - DNA, 2208 bp, synthetic construct
  misc_feature 1..2208: note = Adeno Associated Virus Capsid Protein Variant
  source 1..2208: mol_type = other DNA
atggctgccgatggttatcttccagattggctcgaggacaaccttagtgaaggaattcgcgagtggtgggctttgaaacctggagcccctcaacccaaggcaaatcaacaacatcaagacaacgctcgaggtcttgtgcttccgggttacaaataccttggacccggcaacggactcgacaagggggagccggtcaacgcagcagacgcggcggccctcgagcacgacaaggcctacgaccagcagctcaaggccggagacaacccgtacctcaagtacaaccacgccgacgccgagttccaggagcggctcaaagaagatacgtcttttgggggcaacctcgggcgagcagtcttccaggccaaaaagaggcttcttgaacctcttggtctggttgaggaagcggctaagacggctcctggaaagaagaggcctgtagagcagtctcctcaggaaccggactcctccgcgggtattggcaaatcgggtgcacagcccgctaaaaagagactcaatttcggtcagactggcgacacagagtcagtcccagaccctcaaccaatcggagaacctcccgcagccccctcaggtgtgggatctcttacaatggcttcaggtggtggcgcaccagtggcagacaataacgaaggtgccgatggagtgggtagttcctcgggaaattggcattgcgattcccaatggctgggggacagagtcatcaccaccagcacccgaacctgggccctgcccacctacaacaatcacctctacaagcaaatctccaacagcacatctggaggatcttcaaatgacaacgcctacttcggctacagcaccccctgggggtattttgacttcaacagattccactgccacttctcaccacgtgactggcagcgactcatcaacaacaactggggattccggcctaagcgactcaacttcaagctcttcaacattcaggtcaaagaggttacggacaacaatggagtcaagaccatcgccaataaccttaccagcacggtccaggtcttcacggactcagactatcagctcccgtacgtgctcgggtcggctcacgagggctgcctcccgccgttcccagcggacgttttcatgattcctcagtacgggtatctgacgcttaatgatggaagccaggccgtgggtcgttcgtccttttactgcctggaatatttcccgtcgcaaatgctaagaacgggtaacaacttccagttcagctacgagtttgagaacgtacctttccatagcagctacgctcacagccaaagcctggaccgactaatgaatccactcatcgaccaatacttgtactatctctcaaagactattaacggttctggacagggccaacaaacgctaaaattcagtctagccggacccagcaacatggctgtccagggaagaaactacatacctggacccagctaccgacaacaacgtgtctcaaccactgtgacttttaacaacaacagcgaatttgcttggcctggagcttcttcttgggctctcaatggacgtaatagcttgatgaatcctggacctgctatggccagccacaaagaaggagaggaccgtttctttcctttgtctggatctttaatttttggcaaacaaggaactggaagagacaacgtggatgcggacaaagtcatgataaccaacgaagaagaaattaaaactactaacccggtagcaacggagtcctatggacaagtggccacaaaccaccagagtgcccgggcacaggcgcagaccggctgggttcaaaaccaaggaatacttccgggtatggtttggcaggacagagatgtgtacctgcaaggacccatttgggccaaaattcctcacacggacggcaactttcacccttctccgctgatgggagggtttggaatgaagcacccgcctcctcagatcctcatcaaaaacacacctgtacctgcggatcctccaacggccttcaacaagggcaagctgaactctttcatcacccagtattctactggccaagtcagcgtggagatcgagtgggagctgcagaaggaaaacagcaagcgctggaacccggagatccagtacacttccaactattacaagtctaataatgttgaatttgctgttaatactgaaggtgtatatagtgaaccccgccccattggcaccagatacctgactcgtaatctg

SEQ ID NO: 1000 - protein, 736 aa, synthetic construct
  REGION 1..736: note = Adeno Associated Virus Capsid Protein Variant
MAADGYLPDWLEDNLSEGIREWWALKPGAPQPKANQQHQDNARGLVLPGYKYLGPGNGLDKGEPVNAADAAALEHDKAYDQQLKAGDNPYLKYNHADAEFQERLKEDTSFGGNLGRAVFQAKKRLLEPLGLVEEAAKTAPGKKRPVEQSPQEPDSSAGIGKSGAQPAKKRLNFGQTGDTESVPDPQPIGEPPAAPSGVGSLTMASGGGAPVADNNEGADGVGSSSGNWHCDSQWLGDRVITTSTRTWALPTYNNHLYKQISNSTSGGSSNDNAYFGYSTPWGYFDFNRFHCHFSPRDWQRLINNNWGFRPKRLNFKLFNIQVKEVTDNNGVKTIANNLTSTVQVFTDSDYQLPYVLGSAHEGCLPPFPADVFMIPQYGYLTLNDGSQAVGRSSFYCLEYFPSQMLRTGNNFQFSYEFENVPFHSSYAHSQSLDRLMNPLIDQYLYYLSKTINGSGQGQQTLKFSLAGPSNMAVQGRNYIPGPSYRQQRVSTTVTFNNNSEFAWPGASSWALNGRNSLMNPGPAMASHKEGEDRFFPLSGSLIFGKQGTGRDNVDADKVMITNEEEIKTTNPVATESYGQVATNHQSARAQAQTGWVQNQGILPGMVWQDRDVYLQGPIWAKIPHTDGNFHPSPLMGGFGMKHPPPQILIKNTPVPADPPTAFNKGKLNSFITQYSTGQVSVEIEWELQKENSKRWNPEIQYTSNYYKSNNVEFAVNTEGVYSEPRPIGTRYLTRNL

SEQ ID NO: 1001 - DNA, 2208 bp, synthetic construct
  misc_feature 1..2208: note = Adeno Associated Virus Capsid Protein Variant
  source 1..2208: mol_type = other DNA
atggctgccgatggttatcttccagattggctcgaggacaaccttagtgaaggaattcgcgagtggtgggctttgaaacctggagcccctcaacccaaggcaaatcaacaacatcaagacaacgctcgaggtcttgtgcttccgggttacaaataccttggacccggcaacggactcgacaagggggagccggtcaacgcagcagacgcggcggccctcgagcacgacaaggcctacgaccagcagctcaaggccggagacaacccgtacctcaagtacaaccacgccgacgccgagttctcggagcggctcaaagaagatacgtcttttgggggcaacctcgggcgagcagtcttccaggccaaaaagaggcttcttgaacctcttggtctggttgaggaagcggctaagacggctcctggaaagaagaggcctgtagagcagtctcctcaggaaccggactcctccgcgggtattggcaaatcgggtgcacagcccgctaaaaagagactcaatttcggtcagactggcgacacagagtcagtcccagaccctcaaccaatcggagaacctcccgcagccccctcaggtgtgggatctcttacaatggcttcaggtggtggcgcaccagtggcagacaataacgaaggtgccgatggagtgggtagttcctcgggaaattggcattgcgattcccaatggctgggggacagagtcatcaccaccagcacccgaacctgggccctgcccacctacaacaatcacctctacaagcaaatctccaacagcacatctggaggatcttcaaatgacaacgcctacttcggctacagcaccccctgggggtattttgacttcaacagattccactgccacttctcaccacgtgactggcagcgactcatcaacaacaactggggattccggcctaagcgactcaacttcaagctcttcaacattcaggtcaaagaggttacggacaacaatggagtcaagaccatcgccaataaccttaccagcacggtccaggtcttcacggactcagactatcagctcccgtacgtgctcgggtcggctcacgagggctgcctcccgccgttcccagcggacgttttcatgattcctcagtacgggtatctgacgcttaatgatggaagccaggccgtgggtcgttcgtccttttactgcctggaatatttcccgtcgcaaatgctaagaacgggtaacaacttccagttcagctacgagtttgagaacgtacctttccatagcagctacgctcacagccaaagcctggaccgactaatgaatccactcatcgaccaatacttgtactatctctcaaagactattaacggttctggacagggccaacaaacgctaaaattcagtgtggccggacccagcaacatggctgtccagggaagaaactacatacctggacccagctaccgacaacaacgtgtctcaaccactgtgacttttaacaacaacagcgaatttgcttggcctggagcttcttcttgggctctcaatggacgtaatagcttgatgaatcctggacctgctatggccagccacaaagaaggagaggaccgtttctttcctttgtctggatctttaatttttggcaaacaaggaactggaagagacaacgtggatgcggacaaagtcatgataaccaacgaagaagaaattaaaactactaacccggtagcaacggagtcctatggacaagtggccacaaaccaccagagtgcccgggcacaggcgcagaccggctgggttcaaaaccaaggaatacttccgggtatggtttggcaggacagagatgtgtacctgcaaggacccatttgggccaaaattcctcacacggacggcaactttcacccttctccgctgatgggagggtttggaatgaagcacccgcctcctcagatcctcatcaaaaacacacctgtacctgcggatcctccaacggccttcaacaagggcaagctgaactctttcatcacccagtattctactggccaagtcagcgtggagatcgagtgggagctgcagaaggaaaacagcaagcgctggaacccggagatccagtacacttccaactattacaagtctaataatgttgaatttgctgttaatactgaaggtgtatatagtgaaccccgccccattggcaccagatacctgactcgtaatctg

SEQ ID NO: 1002 - protein, 736 aa, synthetic construct
  REGION 1..736: note = Adeno Associated Virus Capsid Protein Variant
MAADGYLPDWLEDNLSEGIREWWALKPGAPQPKANQQHQDNARGLVLPGYKYLGPGNGLDKGEPVNAADAAALEHDKAYDQQLKAGDNPYLKYNHADAEFSERLKEDTSFGGNLGRAVFQAKKRLLEPLGLVEEAAKTAPGKKRPVEQSPQEPDSSAGIGKSGAQPAKKRLNFGQTGDTESVPDPQPIGEPPAAPSGVGSLTMASGGGAPVADNNEGADGVGSSSGNWHCDSQWLGDRVITTSTRTWALPTYNNHLYKQISNSTSGGSSNDNAYFGYSTPWGYFDFNRFHCHFSPRDWQRLINNNWGFRPKRLNFKLFNIQVKEVTDNNGVKTIANNLTSTVQVFTDSDYQLPYVLGSAHEGCLPPFPADVFMIPQYGYLTLNDGSQAVGRSSFYCLEYFPSQMLRTGNNFQFSYEFENVPFHSSYAHSQSLDRLMNPLIDQYLYYLSKTINGSGQGQQTLKFSVAGPSNMAVQGRNYIPGPSYRQQRVSTTVTFNNNSEFAWPGASSWALNGRNSLMNPGPAMASHKEGEDRFFPLSGSLIFGKQGTGRDNVDADKVMITNEEEIKTTNPVATESYGQVATNHQSARAQAQTGWVQNQGILPGMVWQDRDVYLQGPIWAKIPHTDGNFHPSPLMGGFGMKHPPPQILIKNTPVPADPPTAFNKGKLNSFITQYSTGQVSVEIEWELQKENSKRWNPEIQYTSNYYKSNNVEFAVNTEGVYSEPRPIGTRYLTRNL

SEQ ID NO: 1003 - DNA, 2208 bp, synthetic construct
  misc_feature 1..2208: note = Adeno Associated Virus Capsid Protein Variant
  source 1..2208: mol_type = other DNA
atggctgccgatggttatcttccagattggctcgaggacaaccttagtgaaggaattcgcgagtggtgggctttgaaacctggagcccctcaacccaaggcaaatcaacaacatcaagacaacgctcgaggtcttgtgcttccgggttacaaataccttggacccggcaacggactcgacaagggggagccggtcaacgcagcagacgcggcggccctcgagcacgacaaggcctacgaccagcagctcaaggccggagacaacccgtacctcaagtacaaccacgccgacgccgagttccaggagcggctcaaagaagatacgtcttttgggggcaacctcgggcgagcagtcttccaggccaaaaagaggcttcttgaacctcttggtctggttgaggaagcggctaagacggctcctggaaagaagaggcctgtagagcagtctcctcaggaaccggactcctccgcgggtattggcaaatcgggtgcacagcccgctaaaaagagactcaatttcggtcagactggcgacacagagtcagtcccagaccctcaaccaatcggagaacctcccgcagccccctcaggtgtgggatctcttacaatggcttcaggtggtggcgcaccagtggcagacaataacgaaggtgccgatggagtgggtagttcctcgggaaattggcattgcgattcccaatggctgggggacagagtcatcaccaccagcacccgaacctgggccctgcccacctacaacaatcacctctacaagcaaatctccaacagcgagtctggaggatcttcaaatgacaacgcctacttcggctacagcaccccctgggggtattttgacttcaacagattccactgccacttctcaccacgtgactggcagcgactcatcaacaacaactggggattccggcctaagcgactcaacttcaagctcttcaacattcaggtcaaagaggttacggacaacaatggagtcaagaccatcgccaataaccttaccagcacggtccaggtcttcacggactcagactatcagctcccgtacgtgctcgggtcggctcacgagggctgcctcccgccgttcccagcggacgttttcatgattcctcagtacgggtatctgacgcttaatgatggaagccaggccgtgggtcgttcgtccttttactgcctggaatatttcccgtcgcaaatgctaagaacgggtaacaacttccagttcagctacgagtttgagaacgtacctttccatagcagctacgctcacagccaaagcctggaccgactaatgaatccactcatcgaccaatacttgtactatctctcaaagactattaacggttctggacagggccaacaaacgctaaaattcagtgtggccggacccagcaacatggctgtccagggaagaaactacatacctggacccagctaccgacaacaacgtgtctcaaccactgtgacttttaacaacaacagcgaatttgcttggcctggagcttcttcttgggctctcaatggacgtaatagcttgatgaatcctggacctgctatggccagccacaaagaaggagaggaccgtttctttcctttgtctggatctttaatttttggcaaacaaggaactggaagagacaacgtggatgcggacaaagtcatgataaccaacgaagaagaaattaaaactactaacccggtagcaacggagtcctatggacaagtggccacaaaccaccagagtgcccgggcacaggcgcagaccggctgggttcaaaaccaaggaatacttccgggtatggtttggcaggacagagatgtgtacctgcaaggacccatttgggccaaaattcctcacacggacggcaactttcacccttctccgctgatgggagggtttggaatgaagcacccgcctcctcagatcctcatcaaaaacacacctgtacctgcggatcctccaacggccttcaacaagggcaagctgaactctttcatcacccagtattctactggccaagtcagcgtggagatcgagtgggagctgcagaaggaaaacagcaagcgctggaacccggagatccagtacacttccaactattacaagtctaataatgttgaatttgctgttaatactgaaggtgtatatagtgaaccccgccccattggcaccagatacctgactcgtaatctg

SEQ ID NO: 1004 - protein, 736 aa, synthetic construct
  REGION 1..736: note = Adeno Associated Virus Capsid Protein Variant
MAADGYLPDWLEDNLSEGIREWWALKPGAPQPKANQQHQDNARGLVLPGYKYLGPGNGLDKGEPVNAADAAALEHDKAYDQQLKAGDNPYLKYNHADAEFQERLKEDTSFGGNLGRAVFQAKKRLLEPLGLVEEAAKTAPGKKRPVEQSPQEPDSSAGIGKSGAQPAKKRLNFGQTGDTESVPDPQPIGEPPAAPSGVGSLTMASGGGAPVADNNEGADGVGSSSGNWHCDSQWLGDRVITTSTRTWALPTYNNHLYKQISNSESGGSSNDNAYFGYSTPWGYFDFNRFHCHFSPRDWQRLINNNWGFRPKRLNFKLFNIQVKEVTDNNGVKTIANNLTSTVQVFTDSDYQLPYVLGSAHEGCLPPFPADVFMIPQYGYLTLNDGSQAVGRSSFYCLEYFPSQMLRTGNNFQFSYEFENVPFHSSYAHSQSLDRLMNPLIDQYLYYLSKTINGSGQGQQTLKFSVAGPSNMAVQGRNYIPGPSYRQQRVSTTVTFNNNSEFAWPGASSWALNGRNSLMNPGPAMASHKEGEDRFFPLSGSLIFGKQGTGRDNVDADKVMITNEEEIKTTNPVATESYGQVATNHQSARAQAQTGWVQNQGILPGMVWQDRDVYLQGPIWAKIPHTDGNFHPSPLMGGFGMKHPPPQILIKNTPVPADPPTAFNKGKLNSFITQYSTGQVSVEIEWELQKENSKRWNPEIQYTSNYYKSNNVEFAVNTEGVYSEPRPIGTRYLTRNL

SEQ ID NO: 1005 - DNA, 2208 bp, synthetic construct
  misc_feature 1..2208: note = Adeno Associated Virus Capsid Protein Variant
  source 1..2208: mol_type = other DNA
atggctgccgatggttatcttccagattggctcgaggacaaccttagtgaaggaattcgcgagtggtgggctttgaaacctggagcccctcaacccaaggcaaatcaacaacatcaagacaacgctcgaggtcttgtgcttccgggttacaaataccttggacccggcaacggactcgacaagggggagccggtcaacgcagcagacgcggcggccctcgagcacgacaaggcctacgaccagcagctcaaggccggagacaacccgtacctcaagtacaaccacgccgacgccgagttccaggagcggctcaaagaagatacgtcttttgggggcaacctcgggcgagcagtcttccaggccaaaaagaggcttcttgaacctcttggtctggttgaggaagcggctaagacggctcctggaaagaagaggcctgtagagcagtctcctcaggaaccggactcctccgcgggtattggcaaatcgggtgcacagcccgctaaaaagagactcaatttcggtcagactggcgacacagagtcagtcccagaccctcaaccaatcggagaacctcccgcagccccctcaggtgtgggatctcttacaatggcttcaggtggtggcgcaccagtggcagacaataacgaaggtgccgatggagtgggtagttcctcgggaaattggcattgcgattcccaatggctgggggacagagtcatcaccaccagcacccgaacctgggccctgcccacctacaacaatcacctctacaagcaaatctccaacagcacatctggaggatcttcacatgacaacgcctacttcggctacagcaccccctgggggtattttgacttcaacagattccactgccacttctcaccacgtgactggcagcgactcatcaacaacaactggggattccggcctaagcgactcaacttcaagctcttcaacattcaggtcaaagaggttacggacaacaatggagtcaagaccatcgccaataaccttaccagcacggtccaggtcttcacggactcagactatcagctcccgtacgtgctcgggtcggctcacgagggctgcctcccgccgttcccagcggacgttttcatgattcctcagtacgggtatctgacgcttaatgatggaagccaggccgtgggtcgttcgtccttttactgcctggaatatttcccgtcgcaaatgctaagaacgggtaacaacttccagttcagctacgagtttgagaacgtacctttccatagcagctacgctcacagccaaagcctggaccgactaatgaatccactcatcgaccaatacttgtactatctctcaaagactattaacggttctggacagggccaacaaacgctaaaattcagtgtggccggacccagcaacatggctgtccagggaagaaactacatacctggacccagctaccgacaacaacgtgtctcaaccactgtgacttttaacaacaacagcgaatttgcttggcctggagcttcttcttgggctctcaatggacgtaatagcttgatgaatcctggacctgctatggccagccacaaagaaggagaggaccgtttctttcctttgtctggatctttaatttttggcaaacaaggaactggaagagacaacgtggatgcggacaaagtcatgataaccaacgaagaagaaattaaaactactaacccggtagcaacggagtcctatggacaagtggccacaaaccaccagagtgcccgggcacaggcgcagaccggctgggttcaaaaccaaggaatacttccgggtatggtttggcaggacagagatgtgtacctgcaaggacccatttgggccaaaattcctcacacggacggcaactttcacccttctccgctgatgggagggtttggaatgaagcacccgcctcctcagatcctcatcaaaaacacacctgtacctgcggatcctccaacggccttcaacaagggcaagctgaactctttcatcacccagtattctactggccaagtcagcgtggagatcgagtgggagctgcagaaggaaaacagcaagcgctggaacccggagatccagtacacttccaactattacaagtctaataatgttgaatttgctgttaatactgaaggtgtatatagtgaaccccgccccattggcaccagatacctgactcgtaatctg

SEQ ID NO: 1006 - protein, 736 aa, synthetic construct
  REGION 1..736: note = Adeno Associated Virus Capsid Protein Variant
MAADGYLPDWLEDNLSEGIREWWALKPGAPQPKANQQHQDNARGLVLPGYKYLGPGNGLDKGEPVNAADAAALEHDKAYDQQLKAGDNPYLKYNHADAEFQERLKEDTSFGGNLGRAVFQAKKRLLEPLGLVEEAAKTAPGKKRPVEQSPQEPDSSAGIGKSGAQPAKKRLNFGQTGDTESVPDPQPIGEPPAAPSGVGSLTMASGGGAPVADNNEGADGVGSSSGNWHCDSQWLGDRVITTSTRTWALPTYNNHLYKQISNSTSGGSSHDNAYFGYSTPWGYFDFNRFHCHFSPRDWQRLINNNWGFRPKRLNFKLFNIQVKEVTDNNGVKTIANNLTSTVQVFTDSDYQLPYVLGSAHEGCLPPFPADVFMIPQYGYLTLNDGSQAVGRSSFYCLEYFPSQMLRTGNNFQFSYEFENVPFHSSYAHSQSLDRLMNPLIDQYLYYLSKTINGSGQGQQTLKFSVAGPSNMAVQGRNYIPGPSYRQQRVSTTVTFNNNSEFAWPGASSWALNGRNSLMNPGPAMASHKEGEDRFFPLSGSLIFGKQGTGRDNVDADKVMITNEEEIKTTNPVATESYGQVATNHQSARAQAQTGWVQNQGILPGMVWQDRDVYLQGPIWAKIPHTDGNFHPSPLMGGFGMKHPPPQILIKNTPVPADPPTAFNKGKLNSFITQYSTGQVSVEIEWELQKENSKRWNPEIQYTSNYYKSNNVEFAVNTEGVYSEPRPIGTRYLTRNL

SEQ ID NO: 1007 - DNA, 2208 bp, synthetic construct
  misc_feature 1..2208: note = Adeno Associated Virus Capsid Protein Variant
  source 1..2208: mol_type = other DNA
atggctgccgatggttatcttccagattggctcgaggacaaccttagtgaaggaattcgcgagtggtgggctttgaaacctggagcccctcaacccaaggcaaatcaacaacatcaagacaacgctcgaggtcttgtgcttccgggttacaaataccttggacccggcaacggactcgacaagggggagccggtcaacgcagcagacgcggcggccctcgagcacgacaaggcctacgaccagcagctcaaggccggagacaacccgtacctcaagtacaaccacgccgacgccgagttccaggagcggctcaaagaagatacgtcttttgggggcaacctcgggcgagcagtcttccaggccaaaaagaggcttcttgaacctcttggtctggttgaggaagcggctaagacggctcctggaaagaagaggcctgtagagcagtctcctcaggaaccggactcctccgcgggtattggcaaatcgggtgcacagcccgctaaaaagagactcgatttcggtcagactggcgacacagagtcagtcccagaccctcaaccaatcggagaacctcccgcagccccctcaggtgtgggatctcttacaatggcttcaggtggtggcgcaccagtggcagacaataacgaaggtgccgatggagtgggtagttcctcgggaaattggcattgcgattcccaatggctgggggacagagtcatcaccaccagcacccgaacctgggccctgcccacctacaacaatcacctctacaagcaaatctccaacagcacatctgttggatcttcaaatgacaacgcctacttcggctacagcaccccctgggggtattttgacttcaacagattccactgccacttctcaccacgtgactggcagcgactcatcaacaacaactggggattccggcctaagcgactcaacttcaagctcttcaacattcaggtcaaagaggttacggacaacaatggagtcaagaccatcgccaataaccttaccagcacggtccaggtcttcacggactcagactatcagctcccgtacgtgctcgggtcggctcacgagggctgcctcccgccgttcccagcggacgttttcatgattcctcagtacgggtatctgacgcttaatgatggaagccaggccgtgggtcgttcgtccttttactgcctggaatatttcccgtcgcaaatgctaagaacgggtaacaacttccagttcagctacgagtttgagaacgtacctttccatagcagctacgctcacagccaaagcctggaccgactaatgaatccactcatcgaccaatacttgtactatctctcaaagactattaacggttctggacagggccaacaaacgctaaaattcagtgtggccggacccagcaacatggctgtccagggaagaaactacatacctggacccagctaccgacaacaacgtgtctcaaccactgtgacttttaacaacaacagcgaatttgcttggcctggagcttcttcttgggctctcaatggacgtaatagcttgatgaatcctggacctgctatggccagccacaaagaaggagaggaccgtttctttcctttgtctggatctttaatttttggcaaacaaggaactggaagagacaacgtggatgcggacaaagtcatgataaccaacgaagaagaaattaaaactactaacccggtagcaacggagtcctatggacaagtggccacaaaccaccagagtgcccgggcacaggcgcagaccggctgggttcaaaaccaaggaatacttccgggtatggtttggcaggacagagatgtgtacctgcaaggacccatttgggccaaaattcctcacacggacggcaactttcacccttctccgctgatgggagggtttggaatgaagcacccgcctcctcagatcctcatcaaaaacacacctgtacctgcggatcctccaacggccttcaacaagggcaagctgaactctttcatcacccagtattctactggccaagtcagcgtggagatcgagtgggagctgcagaaggaaaacagcaagcgctggaacccggagatccagtacacttccaactattacaagtctaataatgttgaatttgctgttaatactgaaggtgtatatagtgaaccccgccccattggcaccagatacctgactcgtaatctg

SEQ ID NO: 1008 - protein, 736 aa, synthetic construct
  REGION 1..736: note = Adeno Associated Virus Capsid Protein Variant
MAADGYLPDWLEDNLSEGIREWWALKPGAPQPKANQQHQDNARGLVLPGYKYLGPGNGLDKGEPVNAADAAALEHDKAYDQQLKAGDNPYLKYNHADAEFQERLKEDTSFGGNLGRAVFQAKKRLLEPLGLVEEAAKTAPGKKRPVEQSPQEPDSSAGIGKSGAQPAKKRLDFGQTGDTESVPDPQPIGEPPAAPSGVGSLTMASGGGAPVADNNEGADGVGSSSGNWHCDSQWLGDRVITTSTRTWALPTYNNHLYKQISNSTSVGSSNDNAYFGYSTPWGYFDFNRFHCHFSPRDWQRLINNNWGFRPKRLNFKLFNIQVKEVTDNNGVKTIANNLTSTVQVFTDSDYQLPYVLGSAHEGCLPPFPADVFMIPQYGYLTLNDGSQAVGRSSFYCLEYFPSQMLRTGNNFQFSYEFENVPFHSSYAHSQSLDRLMNPLIDQYLYYLSKTINGSGQGQQTLKFSVAGPSNMAVQGRNYIPGPSYRQQRVSTTVTFNNNSEFAWPGASSWALNGRNSLMNPGPAMASHKEGEDRFFPLSGSLIFGKQGTGRDNVDADKVMITNEEEIKTTNPVATESYGQVATNHQSARAQAQTGWVQNQGILPGMVWQDRDVYLQGPIWAKIPHTDGNFHPSPLMGGFGMKHPPPQILIKNTPVPADPPTAFNKGKLNSFITQYSTGQVSVEIEWELQKENSKRWNPEIQYTSNYYKSNNVEFAVNTEGVYSEPRPIGTRYLTRNL

SEQ ID NO: 1009 - DNA, 2208 bp, synthetic construct
  misc_feature 1..2208: note = Adeno Associated Virus Capsid Protein Variant
  source 1..2208: mol_type = other DNA
atggctgccgatggttatcttccagattggctcgaggacaaccttagtgaaggaattcgcgagtggtgggctttgaaacctggagcccctcaacccaaggcaaatcaacaacatcaagacaacgctcgaggtcttgtgcttccgggttacaaataccttggacccggcaacggactcgacaagggggagccggtcaacgcagcagacgcggcggccctcgagcacgacaaggcctacgaccagcagctcaaggccggagacaacccgaggctcaagtacaaccacgccgacgccgagttccaggagcggctcaaagaagatacgtcttttgggggcaacctcgggcgagcagtcttccaggccaaaaagaggcttcttgaacctcttggtctggttgaggaagcggctaagacggctcctggaaagaagaggcctgtagagcagtctcctcaggaaccggactcctccgcgggtattggcaaatcgggtgcacagcccgctaaaaagagactcaatttcggtcagactggcgacacagagtcagtcccagaccctcaaccaatcggagaacctcccgcagccccctcaggtgtgggatctcttacaatggcttcaggtggtggcgcaccagtggcagacaataacgaaggtgccgatggagtgggtagttcctcgggaaattggcattgcgattcccaatggctgggggacagagtcatcaccaccagcacccgaacctgggccctgcccacctacaacaatcacctctacaagcaaatctccaacagcacatctggaggatcttcaaatgacaacgcctacttcggctacagcaccccctgggggtattttgacttcaacagattccactgccacttctcaccacgtgactggcagcgactcatcaacaacaactggggattccggcctaagcgactcaacttcaagctcttcaacattcaggtcaaagaggttacggacaacaatggagtcaagaccatcgccaataaccttaccagcacggtccaggtcttcacggactcagactatcagctcccgtacgtgctcgggtcggctcacgagggctgcctcccgccgttcccagcggacgttttcatgattcctcagtacgggtatctgacgcttaatgatggaagccaggccgtgggtcgttcgtccttttactgcctggaatatttcccgtcgcaaatgctaagaacgggtaacaacttccagttcagctacgagtttgagaacgtacctttccatagcagctacgctcacagccaaagcctggaccgactaatgaatccactcatcgaccaatacttgtactatctctcaaagactattaacggttctggacagggccaacaaacgctaaaattcagtgtggccggacccagcaacatggctgtccagggaagaaactacatacctggacccagctaccgacaacaacgtgtctcaaccactgtgacttttaacaacaacagcgaatttgcttggcctggagcttcttcttgggctctcaatggacgtaatagcttgatgaatcctggacctgctatggccagccacaaagaaggagaggaccgtttctttcctttgtctggatctttaatttttggcaaacaaggaactggaagagacaacgtggatgcggacaaagtcatgataaccaacgaagaagaaattaaaactactaacccggtagcaacggagtcctatggacaagtggccacaaaccaccagagtgcccgggcacaggcgcagaccggctgggttcaaaaccaaggaatacttccgggtatggtttggcaggacagagatgtgtacctgcaaggacccatttgggccaaaattcctcacacggacggcaactttcacccttctccgctgatgggagggtttggaatgaagcacccgcctcctcagatcctcatcaaaaacacacctgtacctgcggatcctccaacggccttcaacaagggcaagctgaactctttcatcacccagtattctactggccaagtcagcgtggagatcgagtgggagctgcagaaggaaaacagcaagcgctggaacccggagatccagtacacttccaactattacaagtctaataatgttgaatttgctgttaatactgaaggtgtatatagtgaaccccgccccattggcaccagatacctgactcgtaatctg

SEQ ID NO: 1010 - protein, 736 aa, synthetic construct
  REGION 1..736: note = Adeno Associated Virus Capsid Protein Variant
MAADGYLPDWLEDNLSEGIREWWALKPGAPQPKANQQHQDNARGLVLPGYKYLGPGNGLDKGEPVNAADAAALEHDKAYDQQLKAGDNPRLKYNHADAEFQERLKEDTSFGGNLGRAVFQAKKRLLEPLGLVEEAAKTAPGKKRPVEQSPQEPDSSAGIGKSGAQPAKKRLNFGQTGDTESVPDPQPIGEPPAAPSGVGSLTMASGGGAPVADNNEGADGVGSSSGNWHCDSQWLGDRVITTSTRTWALPTYNNHLYKQISNSTSGGSSNDNAYFGYSTPWGYFDFNRFHCHFSPRDWQRLINNNWGFRPKRLNFKLFNIQVKEVTDNNGVKTIANNLTSTVQVFTDSDYQLPYVLGSAHEGCLPPFPADVFMIPQYGYLTLNDGSQAVGRSSFYCLEYFPSQMLRTGNNFQFSYEFENVPFHSSYAHSQSLDRLMNPLIDQYLYYLSKTINGSGQGQQTLKFSVAGPSNMAVQGRNYIPGPSYRQQRVSTTVTFNNNSEFAWPGASSWALNGRNSLMNPGPAMASHKEGEDRFFPLSGSLIFGKQGTGRDNVDADKVMITNEEEIKTTNPVATESYGQVATNHQSARAQAQTGWVQNQGILPGMVWQDRDVYLQGPIWAKIPHTDGNFHPSPLMGGFGMKHPPPQILIKNTPVPADPPTAFNKGKLNSFITQYSTGQVSVEIEWELQKENSKRWNPEIQYTSNYYKSNNVEFAVNTEGVYSEPRPIGTRYLTRNL

SEQ ID NO: 1011 - DNA, 2208 bp, synthetic construct
  misc_feature 1..2208: note = Adeno Associated Virus Capsid Protein Variant
  source 1..2208: mol_type = other DNA
atggctgccgatggttatcttccagattggctcgaggacaaccttagtgaaggaattcgcgagtggtgggctttgaaacctggagcccctcaacccaaggcaaatcaacaacatcaagacaacgctcgaggtcttgtgcttccgggttacaaataccttggacccggcaacggactcgacaagggggagccggtcaacgcagcagacgcggcggccctcgagcacgacaaggcctacgaccagcagctcaaggccggagacaacccgtacctcaagtacaaccacgccgacgccgagttccaggagcggctcaaagaagatacgtcttttgggggcaacctcgggcgagcagtcttccaggccaaaaagaggcttcttgaacctcttggtctggttgaggaagcggctaagacggctcctggaaagaagaggcctgtagagcagtctcctcaggaaccggactcctccgcgggtattggcaaatcgggtgcacagcccgctaaaaagagactcaatttcggtcagactggcgacacagagtcagtcccagaccctcaaccaatcggagaacctcccgcagccccctcaggtgtgggatctcttacaatggcttcaggtggtggcgcaccagtggcagacaataacgaaggtgccgatggagtgggtagttcctcgggaaattggcattgcgattcccaatggctgggggacagagtcatcaccaccagcacccgaacctgggccctgcccacctacaacaatcacctctacaagcaaatctccaacagcacatctggaggatcttcaaatgacaacgcctacttcggctacagcaccccctgggggtattttgacttcaacagattccactgccacttctcaccacgtgactggcagcgactcatcaacaacaactggggattccggcctaagcgactcaacttcaagctcttcaacattcaggtcaaagaggttacggacaacaatggagtcaagaccatcgccaataaccttaccagcacggtccaggtcttcacggactcagactatcagctcccgtacgtgctcgggtcggctcacgagggctgcctcccgccgttcccagcggacgttttcatgattcctcagtacgggtatctgacgcttaatgatggaagccaggccgtgggtcgttcgtccttttactgcctggaatatttcccgtcgcaaatgctaagaacgggtaacaacttccagttcagctacgagtttgagaacgtacctttccatagcagctacgctcacagccaaagcctggaccgactaatgaatccactcatcgaccaatacttgtactatctctcaaagactattaacggttctggacagggccaacaaacgctaaaattcagtgtggccggacccagcaacatggctgtccagggaagaaactacatacctggacccagctaccgacaacaacgtgtctcaaccactgtgacttttaacaacaacagcgaatttgcttggcctggagcttcttcttgggctctcaatggacgtaatagcttgatgaatcctggacctgctatggccagccacaaagaaggagaggaccgtttctttcctttgtctggatctttaatttttggcaaacaaggaactggaagagacaacgtggatgcggacaaagtcatgataaccaacgaagaagaaattaaaactactaacccggtagcaacggagtcctatggacaagtggccacaaaccaccagagtgcccgggcacaggcgcagaccggctgggttattaaccaaggaatacttccgggtatggtttggcaggacagagatgtgtacctgcaaggacccatttgggccaaaattcctcacacggacggcaactttcacccttctccgctgatgggagggtttggaatgaagcacccgcctcctcagatcctcatcaaaaacacacctgtacctgcggatcctccaacggccttcaacaagggcaagctgaactctttcatcacccagtattctactggccaagtcagcgtggagatcgagtgggagctgcagaaggaaaacagcaagcgctggaacccggagatccagtacacttccaactattacaagtctaataatgttgaatttgctgttaatactgaaggtgtatatagtgaaccccgccccattggcaccagatacctgactcgtaatctg

SEQ ID NO: 1012 - protein, 736 aa, synthetic construct
  REGION 1..736: note = Adeno Associated Virus Capsid Protein Variant
MAADGYLPDWLEDNLSEGIREWWALKPGAPQPKANQQHQDNARGLVLPGYKYLGPGNGLDKGEPVNAADAAALEHDKAYDQQLKAGDNPYLKYNHADAEFQERLKEDTSFGGNLGRAVFQAKKRLLEPLGLVEEAAKTAPGKKRPVEQSPQEPDSSAGIGKSGAQPAKKRLNFGQTGDTESVPDPQPIGEPPAAPSGVGSLTMASGGGAPVADNNEGADGVGSSSGNWHCDSQWLGDRVITTSTRTWALPTYNNHLYKQISNSTSGGSSNDNAYFGYSTPWGYFDFNRFHCHFSPRDWQRLINNNWGFRPKRLNFKLFNIQVKEVTDNNGVKTIANNLTSTVQVFTDSDYQLPYVLGSAHEGCLPPFPADVFMIPQYGYLTLNDGSQAVGRSSFYCLEYFPSQMLRTGNNFQFSYEFENVPFHSSYAHSQSLDRLMNPLIDQYLYYLSKTINGSGQGQQTLKFSVAGPSNMAVQGRNYIPGPSYRQQRVSTTVTFNNNSEFAWPGASSWALNGRNSLMNPGPAMASHKEGEDRFFPLSGSLIFGKQGTGRDNVDADKVMITNEEEIKTTNPVATESYGQVATNHQSARAQAQTGWVINQGILPGMVWQDRDVYLQGPIWAKIPHTDGNFHPSPLMGGFGMKHPPPQILIKNTPVPADPPTAFNKGKLNSFITQYSTGQVSVEIEWELQKENSKRWNPEIQYTSNYYKSNNVEFAVNTEGVYSEPRPIGTRYLTRNL

SEQ ID NO: 1013 - DNA, 2208 bp, synthetic construct
  misc_feature 1..2208: note = Adeno Associated Virus Capsid Protein Variant
  source 1..2208: mol_type = other DNA
atggctgccgatggttatcttccagattggctcgaggacaaccttagtgaaggaattcgcgagtggtgggctttgaaacctggagcccctcaacccaaggcaaatcaacaacatcaagacaacgctcgaggtcttgtgcttccgggttacaaataccttggacccggcaacggactcgacaagggggagccggtcaacgcagcagacgcggcggccctcgagcacgacaaggcctacgaccagcagctcaaggccggagacaacccggccctcaagtacaaccacgccgacgccgagttccaggagcggctcaaagaagatacgtcttttgggggcaacctcgggcgagcagtcttccaggccaaaaagaggcttcttgaacctcttggtctggttgaggaagcggctaagacggctcctggaaagaagaggcctgtagagcagtctcctcaggaaccggactcctccgcgggtattggcaaatcgggtgcacagcccgctaaaaagagactcaatttcggtcagactggcgacacagagtcagtcccagaccctcaaccaatcggagaacctcccgcagccccctcaggtgtgggatctcttacaatggcttcaggtggtggcgcaccagtggcagacaataacgaaggtgccgatggagtgggtagttcctcgggaaattggcattgcgattcccaatggctgggggacagagtcatcaccaccagcacccgaacctgggccctgcccacctacaacaatcacctctacaagcaaatctccaacagcacatctggaggatcttcaaatgacaacgcctacttcggctacagcaccccctgggggtattttgacttcaacagattccactgccacttctcaccacgtgactggcagcgactcatcaacaacaactggggattccggcctaagcgactcaacttcaagctcttcaacattcaggtcaaagaggttacggacaacaatggagtcaagaccatcgccaataaccttaccagcacggtccaggtcttcacggactcagactatcagctcccgtacgtgctcgggtcggctcacgagggctgcctcccgccgttcccagcggacgttttcatgattcctcagtacgggtatctgacgcttaatgatggaagccaggccgtgggtcgttcgtccttttactgcctggaatatttcccgtcgcaaatgctaagaacgggtaacaacttccagttcagctacgagtttgagaacgtacctttccatagcagctacgctcacagccaaagcctggaccgactaatgaatccactcatcgaccaatacttgtactatctctcaaagactattaacggttctggacagggccaacaaacgctaaaattcagtgtggccggacccagcaacatggctgtccagggaagaaactacatacctggacccagctaccgacaacaacgtgtctcaaccactgtgacttttaacaacaacagcgaatttgcttggcctggagcttcttcttgggctctcaatggacgtaatagcttgatgaatcctggacctgctatggccagccacaaagaaggagaggaccgtttcggccctttgtctggatctttaatttttggcaaacaaggaactggaagagacaacgtggatgcggacaaagtcatgataaccaacgaagaagaaattaaaactactaacccggtagcaacggagtcctatggacaagtggccacaaaccaccagagtgcccgggcacaggcgcagaccggctgggttcaaaaccaaggaatacttccgggtatggtttggcaggacagagatgtgtacctgcaaggacccatttgggccaaaattcctcacacggacggcaactttcacccttctccgctgatgggagggtttggaatgaagcacccgcctcctcagatcctcatcaaaaacacacctgtacctgcggatcctccaacggccttcaacaagggcaagctgaactctttcatcacccagtattctactggccaagtcagcgtggagatcgagtgggagctgcagaaggaaaacagcaagcgctggaacccggagatccagtacacttccaactattacaagtctaataatgttgaatttgctgttaatactgaaggtgtatatagtgaaccccgccccattggcaccagatacctgactcgtaatctg

SEQ ID NO: 1014 - protein, 736 aa, synthetic construct
  REGION 1..736: note = Adeno Associated Virus Capsid Protein Variant
MAADGYLPDWLEDNLSEGIREWWALKPGAPQPKANQQHQDNARGLVLPGYKYLGPGNGLDKGEPVNAADAAALEHDKAYDQQLKAGDNPALKYNHADAEFQERLKEDTSFGGNLGRAVFQAKKRLLEPLGLVEEAAKTAPGKKRPVEQSPQEPDSSAGIGKSGAQPAKKRLNFGQTGDTESVPDPQPIGEPPAAPSGVGSLTMASGGGAPVADNNEGADGVGSSSGNWHCDSQWLGDRVITTSTRTWALPTYNNHLYKQISNSTSGGSSNDNAYFGYSTPWGYFDFNRFHCHFSPRDWQRLINNNWGFRPKRLNFKLFNIQVKEVTDNNGVKTIANNLTSTVQVFTDSDYQLPYVLGSAHEGCLPPFPADVFMIPQYGYLTLNDGSQAVGRSSFYCLEYFPSQMLRTGNNFQFSYEFENVPFHSSYAHSQSLDRLMNPLIDQYLYYLSKTINGSGQGQQTLKFSVAGPSNMAVQGRNYIPGPSYRQQRVSTTVTFNNNSEFAWPGASSWALNGRNSLMNPGPAMASHKEGEDRFGPLSGSLIFGKQGTGRDNVDADKVMITNEEEIKTTNPVATESYGQVATNHQSARAQAQTGWVQNQGILPGMVWQDRDVYLQGPIWAKIPHTDGNFHPSPLMGGFGMKHPPPQILIKNTPVPADPPTAFNKGKLNSFITQYSTGQVSVEIEWELQKENSKRWNPEIQYTSNYYKSNNVEFAVNTEGVYSEPRPIGTRYLTRNL

SEQ ID NO: 1015 - DNA, 2208 bp, synthetic construct
  misc_feature 1..2208: note = Adeno Associated Virus Capsid Protein Variant
  source 1..2208: mol_type = other DNA
atggctgccgatggttatcttccagattggctcgaggacaaccttagtgaaggaattcgcgagtggtgggctttgaaacctggagcccctcaacccaaggcaaatcaacaacatcaagacaacgctcgaggtcttgtgcttccgggttacaaataccttggacccggcaacggactcgacaagggggagccggtcaacgcagcagacgcggcggccctcgagcacgacaaggcctacgaccagcagctcaaggccggagacaacccgtacctcaagtacaaccacgccgacgccgagttccaggagcggctcaaagaagatacgtcttttgggggcaacctcgggcgagcagtcttccaggccaaaaagaggcttcttgaacctcttggtctggttgaggaagcggctaagacggctcctggaaagaagaggcctgtagagcagtctcctcaggaaccggactcctccgcgggtattggcaaatcgggtgcacagcccgctaaaaagagactcaatttcggtcagactggcgacacagagtcagtcccagaccctcaaccaatcggagaacctcccgcagccccctcaggtgtgggatctcttacaatggcttcaggtggtggcgcaccagtggcagacaataacgaaggtgccgatggagtgggtagttcctcgggaaattggcattgcgattcccaatggctgggggacagagtcatcaccaccagcacccgaacctgggccctgcccacctacaacaatcacctctacaagcaaatctccaacagcacatctggagtctcttcaaatgacaacgcctacttcggctacagcaccccctgggggtattttgacttcaacagattccactgccacttctcaccacgtgactggcagcgactcatcaacaacaactggggattccggcctaagcgactcaacttcaagctcttcaacattcaggtcaaagaggttacggacaacaatggagtcaagaccatcgccaataaccttaccagcacggtccaggtcttcacggactcagactatcagctcccgtacgtgctcgggtcggctcacgagggctgcctcccgccgttcccagcggacgttttcatgattcctcagtacgggtatctgacgcttaatgatggaagccaggccgtgggtcgttcgtccttttactgcctggaatatttcccgtcgcaaatgctaagaacgggtaacaacttccagttcagctacgagtttgagaacgtacctttccatagcagctacgctcacagccaaagcctggaccgactaatgaatccactcatcgaccaatacttgtactatctctcaaagactattaacggttctggacagggccaacaaacgctaaaattcagtgtggccggacccagcaacatggctgtccagggaagaaactacatacctggacccagctaccgacaacaacgtgtctcaaccactgtgacttttaacaacaacagcgaatttgcttggcctggagcttcttcttgggctctcaatggacgtaatagcttgatgaatcctggacctgctatggccagccacaaagaaggagaggaccgtttctttcctttgtctggatctttaatttttggcaaacaaggaactggaagagacaacgtggatgcggacaaagtcatgataaccaacgaagaagaaattaaaactactaacccggtagcaacggagtcctatggacaagtggccacaaaccaccagagtgcccgggcacaggcgcagaccggctgggttcaaaaccaaggaatacttccgggtatggtttggcaggacagagatgtgtacctgcaaggacccatttgggccaaaattcctcacacggacggcaactttcacccttctccgctgatgggagggtttggaatgaagcacccgcctcctcagatcctcatcaaaaacacacctgtacctgcggatcctccaacggccttcaacaagggcaagctgaactctttcatcacccagtattctactggccaagtcagcgtggagatcgagtgggagctgcagaaggaaaacagcaagcgctggaacccggagatccagtacacttccaactattacaagtctaataatgttgaatttgctgttaatactgaaggtgtatatagtgaaccccgccccattggcaccagatacctgactcgtaatctg

SEQ ID NO: 1016 - protein, 736 aa, synthetic construct
  REGION 1..736: note = Adeno Associated Virus Capsid Protein Variant
MAADGYLPDWLEDNLSEGIREWWALKPGAPQPKANQQHQDNARGLVLPGYKYLGPGNGLDKGEPVNAADAAALEHDKAYDQQLKAGDNPYLKYNHADAEFQERLKEDTSFGGNLGRAVFQAKKRLLEPLGLVEEAAKTAPGKKRPVEQSPQEPDSSAGIGKSGAQPAKKRLNFGQTGDTESVPDPQPIGEPPAAPSGVGSLTMASGGGAPVADNNEGADGVGSSSGNWHCDSQWLGDRVITTSTRTWALPTYNNHLYKQISNSTSGVSSNDNAYFGYSTPWGYFDFNRFHCHFSPRDWQRLINNNWGFRPKRLNFKLFNIQVKEVTDNNGVKTIANNLTSTVQVFTDSDYQLPYVLGSAHEGCLPPFPADVFMIPQYGYLTLNDGSQAVGRSSFYCLEYFPSQMLRTGNNFQFSYEFENVPFHSSYAHSQSLDRLMNPLIDQYLYYLSKTINGSGQGQQTLKFSVAGPSNMAVQGRNYIPGPSYRQQRVSTTVTFNNNSEFAWPGASSWALNGRNSLMNPGPAMASHKEGEDRFFPLSGSLIFGKQGTGRDNVDADKVMITNEEEIKTTNPVATESYGQVATNHQSARAQAQTGWVQNQGILPGMVWQDRDVYLQGPIWAKIPHTDGNFHPSPLMGGFGMKHPPPQILIKNTPVPADPPTAFNKGKLNSFITQYSTGQVSVEIEWELQKENSKRWNPEIQYTSNYYKSNNVEFAVNTEGVYSEPRPIGTRYLTRNL

SEQ ID NO: 1017 - DNA, 2208 bp, synthetic construct
  misc_feature 1..2208: note = Adeno Associated Virus Capsid Protein Variant
  source 1..2208: mol_type = other DNA
atggctgccgatggttatcttccagattggctcgaggacaaccttagtgaaggaattcgcgagtggtgggctttgaaacctggagcccctcaacccaaggcaaatcaacaacatcaagacaacgctcgaggtcttgtgcttccgggttacaaataccttggacccggcaacggactcgacaagggggagccggtcaacgcagcagacgcggcggccctcgagcacgacaaggcctacgaccagcagctcaaggccggagacaacccgtacctcaagtacaaccacgccgacgccgagttccaggagcggctcaaagaagatacgtcttttgggggcaacctcgggcgagcagtcttccaggccaaaaagaggcttcttgaacctcttggtctggttgaggaagcggctaagacggctcctggaaagaagaggcctgtagagcagtctcctcaggaaccggactcctccgcgggtattggcaaatcgggtgcacagcccgctaaaaagagactcaatttcggtcagactggcgacacagagtcagtcccagaccctcaaccaatcggagaacctcccgcagccccctcaggtgtgggatctcttacaatggcttcaggtggtggcgcaccagtggcagacaataacgaaggtgccgatggagtgggtagttcctcgggaaattggcattgcgattcccaatggctgggggacagagtcatcaccaccagcacccgaacctgggccctgcccacctacaacaatcacctctacaagcaaatctccaacagcacatctggaggatcttcaccggacaacgcctacttcggctacagcaccccctgggggtattttgacttcaacagattccactgccacttctcaccacgtgactggcagcgactcatcaacaacaactggggattccggcctaagcgactcaacttcaagctcttcaacattcaggtcaaagaggttacggacaacaatggagtcaagaccatcgccaataaccttaccagcacggtccaggtcttcacggactcggactatcagctcccgtacgtgctcgggtcggctcacgagggctgcctcccgccgttcccagcggacgttttcatgattcctcagtacgggtatctgacgcttaatgatggaagccaggccgtgggtcgttcgtccttttactgcctggaatatttcccgtcgcaaatgctaagaacgggtaacaacttccagttcagctacgagtttgagaacgtacctttccatagcagctacgctcacagccaaagcctggaccgactaatgaatccactcatcgaccaatacttgtactatctctcaaagactattaacggttctggacagggccaacaaacgctaaaattcagtgtggccggacccagcaacatggctgtccagggaagaaactacatacctggacccagctaccgacaacaacgtgtctcaaccactgtgacttttaacaacaacagcgaatttgcttggcctggagcttcttcttgggctctcaatggacgtaatagcttgatgaatcctggacctgctatggccagccacaaagaaggagaggaccgtttctttcctttgtctggatctttaatttttggcaaacaaggaactggaagagacaacgtggatgcggacaaagtcatgataaccaacgaagaagaaattaaaactactaacccggtagcaacggagtcctatggacaagtggccacaaaccaccagagtgcccgggcacaggcgcagaccggctgggttcaaaaccaaggaatacttccgggtatggtttggcaggacagagatgtgtacctgcaaggacccatttgggccaaaattcctcacacggacggcaactttcacccttctccgctgatgggagggtttggaatgaagcacccgcctcctcagatcctcatcaaaaacacacctgtacctgcggatcctccaacggccttcaacaagggcaagctgaactctttcatcacccagtattctactggccaagtcagcgtggagatcgagtgggagctgcagaaggaaaacagcaagcgctggaacccggagatccagtacacttccaactattacaagtctaataatgttgaatttgctgttaatactgaaggtgtatatagtgaaccccgccccattggcaccagatacctgactcgtaatctg

SEQ ID NO: 1018 - protein, 736 aa, synthetic construct
  REGION 1..736: note = Adeno Associated Virus Capsid Protein Variant
MAADGYLPDWLEDNLSEGIREWWALKPGAPQPKANQQHQDNARGLVLPGYKYLGPGNGLDKGEPVNAADAAALEHDKAYDQQLKAGDNPYLKYNHADAEFQERLKEDTSFGGNLGRAVFQAKKRLLEPLGLVEEAAKTAPGKKRPVEQSPQEPDSSAGIGKSGAQPAKKRLNFGQTGDTESVPDPQPIGEPPAAPSGVGSLTMASGGGAPVADNNEGADGVGSSSGNWHCDSQWLGDRVITTSTRTWALPTYNNHLYKQISNSTSGGSSPDNAYFGYSTPWGYFDFNRFHCHFSPRDWQRLINNNWGFRPKRLNFKLFNIQVKEVTDNNGVKTIANNLTSTVQVFTDSDYQLPYVLGSAHEGCLPPFPADVFMIPQYGYLTLNDGSQAVGRSSFYCLEYFPSQMLRTGNNFQFSYEFENVPFHSSYAHSQSLDRLMNPLIDQYLYYLSKTINGSGQGQQTLKFSVAGPSNMAVQGRNYIPGPSYRQQRVSTTVTFNNNSEFAWPGASSWALNGRNSLMNPGPAMASHKEGEDRFFPLSGSLIFGKQGTGRDNVDADKVMITNEEEIKTTNPVATESYGQVATNHQSARAQAQTGWVQNQGILPGMVWQDRDVYLQGPIWAKIPHTDGNFHPSPLMGGFGMKHPPPQILIKNTPVPADPPTAFNKGKLNSFITQYSTGQVSVEIEWELQKENSKRWNPEIQYTSNYYKSNNVEFAVNTEGVYSEPRPIGTRYLTRNL

SEQ ID NO: 1019 - DNA, 2208 bp, synthetic construct
  misc_feature 1..2208: note = Adeno Associated Virus Capsid Protein Variant
  source 1..2208: mol_type = other DNA
atggctgccgatggttatcttccagattggctcgaggacaaccttagtgaaggaattcgcgagtggtgggctttgaaacctggagcccctcaacccaaggcaaatcaacaacatcaagacaacgctcgaggtcttgtgcttccgggttacaaataccttggacccggcaacggactcgacaagggggagccggtcaacgcagcagacgcggcggccctcgagcacgacaaggcctacgaccagcagctcaaggccggagacaacccgtacctcaagtacaaccacgccgacgccgagttccaggagcggctcaaagaagatacgtcttttgggggcaacctcgggcgagcagtcttccaggccaaaaagaggcttcttgaacctcttggtctggttgaggaagcggctaagacggctcctggaaagaagaggcctgtagagcagtctcctcaggaaccggactcctccgcgggtattggcaaatcgggtgcacagcccgctaaaaagagactcaatttcggtcagactggcgacacagagtcagtcccagaccctcaaccaatcggagaacctcccgcagccccctcaggtgtgggatctcttacaatggcttcaggtggtggcgcaccagtggcagacaataacgaaggtgccgatggagtgggtagttcctcgggaaattggcattgcgattcccaatggctgggggacagagtcatcaccaccagcacccgaacctgggccctgcccacctacaacaatcacctctacaagcaaatctccaacagcaactctggaggatcttcaaatgacaacgcctacttcggctacagcaccccctgggggtattttgacttcaacagattccactgccacttctcaccacgtgactggcagcgactcatcaacaacaactggggattccggcctaagcgactcaacttcaagctcttcaacattcaggtcaaagaggttacggacaacaatggagtcaagaccatcgccaataaccttaccagcacggtccaggtcttcacggactcagactatcagctcccgtacgtgctcgggtcggctcacgagggctgcctcccgccgttcccagcggacgttttcatgattcctcagtacgggtatctgacgcttaatgatggaagccaggccgtgggtcgttcgtccttttactgcctggaatatttcccgtcgcaaatgctaagaacgggtaacaacttccagttcagctacgagtttgagaacgtacctttccatagcagctacgctcacagccaaagcctggaccgactaatgaatccactcatcgaccaatacttgtactatctctcaaagactattaacggttctggacagggccaacaaacgctaaaattcagtgtggccggacccagcaacatggctgtccagggaagaaactacatacctggacccagctaccgacaacaacgtgtctcaaccactgtgacttttaacaacaacagcgaatttgcttggcctggagcttcttcttgggctctcaatggacgtaatagcttgatgaatcctggacctgctatggccagccacaaagaaggagaggaccgtttctttcctttgtctggatctttaatttttggcaaacaaggaactggaagagacaacgtggatgcggacaaagtcatgataaccaacgaagaagaaattaaaactactaacccggtagcaacggagtcctatggacaagtggccacaaaccaccagagtgcccgggcacaggcgcagaccggctgggttcaaaaccaaggaatacttccgggtatggtttggcaggacagagatgtgtacctgcaaggacccatttgggccaaaattcctcacacggacggcaactttcacccttctccgctgatgggagggtttggaatgaagcacccgcctcctcagatcctcatcaaaaacacacctgtacctgcggatcctccaacggccttcaacaagggcaagctgaactctttcatcacccagtattctactggccaagtcagcgtggagatcgagtgggagctgcagaaggaaaacagcaagcgctggaacccggagatccagtacacttccaactattacaagtctaataatgttgaatttgctgttaatactgaaggtgtatatagtgaaccccgccccattggcaccagatacctgactcgtaatctg

SEQ ID NO: 1020 - protein, 736 aa, synthetic construct
  REGION 1..736: note = Adeno Associated Virus Capsid Protein Variant
MAADGYLPDWLEDNLSEGIREWWALKPGAPQPKANQQHQDNARGLVLPGYKYLGPGNGLDKGEPVNAADAAALEHDKAYDQQLKAGDNPYLKYNHADAEFQERLKEDTSFGGNLGRAVFQAKKRLLEPLGLVEEAAKTAPGKKRPVEQSPQEPDSSAGIGKSGAQPAKKRLNFGQTGDTESVPDPQPIGEPPAAPSGVGSLTMASGGGAPVADNNEGADGVGSSSGNWHCDSQWLGDRVITTSTRTWALPTYNNHLYKQISNSNSGGSSNDNAYFGYSTPWGYFDFNRFHCHFSPRDWQRLINNNWGFRPKRLNFKLFNIQVKEVTDNNGVKTIANNLTSTVQVFTDSDYQLPYVLGSAHEGCLPPFPADVFMIPQYGYLTLNDGSQAVGRSSFYCLEYFPSQMLRTGNNFQFSYEFENVPFHSSYAHSQSLDRLMNPLIDQYLYYLSKTINGSGQGQQTLKFSVAGPSNMAVQGRNYIPGPSYRQQRVSTTVTFNNNSEFAWPGASSWALNGRNSLMNPGPAMASHKEGEDRFFPLSGSLIFGKQGTGRDNVDADKVMITNEEEIKTTNPVATESYGQVATNHQSARAQAQTGWVQNQGILPGMVWQDRDVYLQGPIWAKIPHTDGNFHPSPLMGGFGMKHPPPQILIKNTPVPADPPTAFNKGKLNSFITQYSTGQVSVEIEWELQKENSKRWNPEIQYTSNYYKSNNVEFAVNTEGVYSEPRPIGTRYLTRNL

SEQ ID NO: 1021 - DNA, 2208 bp, synthetic construct
  misc_feature 1..2208: note = Adeno Associated Virus Capsid Protein Variant
  source 1..2208: mol_type = other DNA
atggctgccgatggttatcttccagattggctcgaggacaaccttagtgaaggaattcgcgagtggtgggctttgaaacctggagcccctcaacccaaggcaaatcaacaacatcaagacaacgctcgaggtcttgtgcttccgggttacaaataccttggacccggcaacggactcgacaagggggagccggtcaacgcagcagacgcggcggccctcgagcacgacaaggcctacgaccagcagctcaaggccggagacaacccgtacctcaagtacaaccacgccgacgccgagttccaggagcggctcaaagaagatacgtcttttgggggcaacctcgggcgagcagtcttccaggccaaaaagaggcttcttgaacctcttggtctggttgaggaagcggctaagacggctcctggaaagaagaggcctgtagagcagtctcctcaggaaccggactcctccgcgggtattggcaaatcgggtgcacagcccgctaaaaagagactcaatttcggtcagactggcgacacagagtcagtcccagaccctcaaccaatcggagaacctcccgcagccccctcaggtgtgggatctcttacaatggcttcaggtggtggcgcaccagtggcagacaataacgaaggtgccgatggagtgggtagttcctcgggaaattggcattgcgattcccaatggctgggggacagagtcatcaccaccagcacccgaacctgggccctgcccacctacaacaatcacctctacaagcaaatctccaacagcacatctggaggatcttcaaatgacaacgcctacttcggctacagcaccccctgggggtattttgacttcaacagattccactgccacttctcaccacgtgactggcagcgactcatcaacaacaactggggattccggcctaagcgactcaacttcaagctcttcaacattcaggtcaaagaggttacggacaacaatggagtcaagaccatcgccaataaccttaccagcacggtccaggtcttcacggactcagactatcagctcccgtacgtgctcgggtcggctcacgagggctgcctcccgccgttcccagcggacgttttcatgattcctcagtacgggtatctgacgcttaatgatggaagccaggccgtgggtcgttcgtccttttactgcctggaatatttcccgtcgcaaatgctaagaacgggtaacaacttccagttcagctacgagtttgagaacgtacctttccatagcagctacgctcacagccaaagcctggaccgactaatgaatccactcatcgaccaatacttgtactatctctcaaagactattaacggttctggacagggccaacaaacgctaaaattcagtgtggccggacccagcaacatggctgtccagggaagaaactacatacctggacccagctaccgacaacaacgtgtctcaaccactgtgacttttaacaacaacagcgaatttgcttggcctggagcttcttcttgggctctcaatggacgtaatagcttgatgaatcctggacctgctatggccagccacaaagaaggagaggaccgtttctttcctttgtctggatctttaatttttggcaaacaaggaactggaagagacaacgtggatgcggacaaagtcatgataaccaacgaagaaggaattaaaactactaacccggtagcaacggagtcctatggacaagtggccacaaaccaccagagtgcccgggcacaggcgcagaccggctgggttcaaaaccaaggaatacttccgggtatggtttggcaggacagagatgtgtacctgcaaggacccatttgggccaaaattcctcacacggacggcaactttcacccttctccgctgatgggagggtttggaatgaagcacccgcctcctcagatcctcatcaaaaacacacctgtacctgcggatcctccaacggccttcaacaagggcaagctgaactctttcatcacccagtattctactggccaagtcagcgtggagatcgagtgggagctgcagaaggaaaacagcaagcgctggaacccggagatccagtacacttccaactattacaagtctaataatgttgaatttgctgttaatactgaaggtgtatatagtgaaccccgccccattggcaccagatacctgactcgtaatctg

SEQ ID NO: 1022 - protein, 736 aa, synthetic construct
  REGION 1..736: note = Adeno Associated Virus Capsid Protein Variant
MAADGYLPDWLEDNLSEGIREWWALKPGAPQPKANQQHQDNARGLVLPGYKYLGPGNGLDKGEPVNAADAAALEHDKAYDQQLKAGDNPYLKYNHADAEFQERLKEDTSFGGNLGRAVFQAKKRLLEPLGLVEEAAKTAPGKKRPVEQSPQEPDSSAGIGKSGAQPAKKRLNFGQTGDTESVPDPQPIGEPPAAPSGVGSLTMASGGGAPVADNNEGADGVGSSSGNWHCDSQWLGDRVITTSTRTWALPTYNNHLYKQISNSTSGGSSNDNAYFGYSTPWGYFDFNRFHCHFSPRDWQRLINNNWGFRPKRLNFKLFNIQVKEVTDNNGVKTIANNLTSTVQVFTDSDYQLPYVLGSAHEGCLPPFPADVFMIPQYGYLTLNDGSQAVGRSSFYCLEYFPSQMLRTGNNFQFSYEFENVPFHSSYAHSQSLDRLMNPLIDQYLYYLSKTINGSGQGQQTLKFSVAGPSNMAVQGRNYIPGPSYRQQRVSTTVTFNNNSEFAWPGASSWALNGRNSLMNPGPAMASHKEGEDRFFPLSGSLIFGKQGTGRDNVDADKVMITNEEGIKTTNPVATESYGQVATNHQSARAQAQTGWVQNQGILPGMVWQDRDVYLQGPIWAKIPHTDGNFHPSPLMGGFGMKHPPPQILIKNTPVPADPPTAFNKGKLNSFITQYSTGQVSVEIEWELQKENSKRWNPEIQYTSNYYKSNNVEFAVNTEGVYSEPRPIGTRYLTRNL

SEQ ID NO: 1023 - DNA, 2208 bp, synthetic construct
  misc_feature 1..2208: note = Adeno Associated Virus Capsid Protein Variant
  source 1..2208: mol_type = other DNA
atggctgccgatggttatcttccagattggctcgaggacaaccttagtgaaggaattcgcgagtggtgggctttgaaacctggagcccctcaacccaaggcaaatcaacaacatcaagacaacgctcgaggtcttgtgcttccgggttacaaataccttggacccggcaacggactcgacaagggggagccggtcaacgcagcagacgcggcggccctcgagcacgacaaggcctacgaccagcagctcaaggccggagacaacccgtacctcaagtacaaccacgccgacgccgagtcccaggagcggctcaaagaagatacgtcttttgggggcaacctcgggcgagcagtcttccaggccaaaaagaggcttcttgaacctcttggtctggttgaggaagcggctaagacggctcctggaaagaagaggcctgtagagcagtctcctcaggaaccggactcctccgcgggtattggcaaatcgggtgcacagcccgctaaaaagagactcaatttcggtcagactggcgacacagagtcagtcccagaccctcaaccaatcggagaacctcccgcagccccctcaggtgtgggatctcttacaatggcttcaggtggtggcgcaccagtggcagacaataacgaaggtgccgatggagtgggtagttcctcgggaaattggcattgcgattcccaatggctgggggacagagtcatcaccaccagcacccgaacctgggccctgcccacctacaacaatcacctctacaagcaaatctccaacagcacatctggaggatcttcaaatgacaacgcctacttcggctacagcaccccctgggggtattttgacttcaacagattccactgccacttctcaccacgtgactggcagcgactcatcaacaacaactggggattccggcctaagcgactcaacttcaagctcttcaacattcaggtcaaagaggttacggacaacaatggagtcaagaccatcgccaataaccttaccagcacggtccaggtcttcacggactcagactatcagctcccgtacgtgctcgggtcggctcacgagggctgcctcccgccgttcccagcggacgttttcatgattcctcagtacgggtatctgacgcttaatgatggaagccaggccgtgggtcgttcgtccttttactgcctggaatatttcccgtcgcaaatgctaagaacgggtaacaacttccagttcagctacgagtttgagaacgtacctttccatagcagctacgctcacagccaaagcctggaccgactaatgaatccactcatcgaccaatacttgtactatctctcaaagactattaacggttctggacagggccaacaaacgctaaaattcagtgtggccggacccagcaacatggctgtccagggaagaaactacatacctggacccagctaccgacaacaacgtgtctcaaccactgtgacttttaacaacaacagcgaatttgcttggcctggagcttcttcttgggctctcaatggacgtaatagcttgatgaatcctggacctgctatggccagccacaaagaaggagaggaccgtttctttcctttgtctggatctttaatttttggcaaacaaggaactggaagagacaacgtggatgcggacaaagtcatgataaccaacgaagaagaaattaaaactactaacccggtagcaacggagtcctatggacaagtggccacaaaccaccagagtgcccgggcacaggcgcagaccggctgggttcaaaaccaaggaatacttccgggtatggtttggcaggacagagatgtgtacctgcaaggacccatttgggccaaaattcctcacacggacggcaactttcacccttctccgctgatgggagggtttggaatgaagcacccgcctcctcagatcctcatcaaaaacacacctgtacctgcggatcctccaacggccttcaacaagggcaagctgaactctttcatcacccagtattctactggccaagtcagcgtggagatcgagtgggagctgcagaaggaaaacagcaagcgctggaacccggagatccagtacacttccaactattacaagtctaataatgttgaatttgctgttaatactgaaggtgtatatagtgaaccccgccccattggcaccagatacctgactcgtaatctg

SEQ ID NO: 1024 - protein, 736 aa, synthetic construct
  REGION 1..736: note = Adeno Associated Virus Capsid Protein Variant
MAADGYLPDWLEDNLSEGIREWWALKPGAPQPKANQQHQDNARGLVLPGYKYLGPGNGLDKGEPVNAADAAALEHDKAYDQQLKAGDNPYLKYNHADAESQERLKEDTSFGGNLGRAVFQAKKRLLEPLGLVEEAAKTAPGKKRPVEQSPQEPDSSAGIGKSGAQPAKKRLNFGQTGDTESVPDPQPIGEPPAAPSGVGSLTMASGGGAPVADNNEGADGVGSSSGNWHCDSQWLGDRVITTSTRTWALPTYNNHLYKQISNSTSGGSSNDNAYFGYSTPWGYFDFNRFHCHFSPRDWQRLINNNWGFRPKRLNFKLFNIQVKEVTDNNGVKTIANNLTSTVQVFTDSDYQLPYVLGSAHEGCLPPFPADVFMIPQYGYLTLNDGSQAVGRSSFYCLEYFPSQMLRTGNNFQFSYEFENVPFHSSYAHSQSLDRLMNPLIDQYLYYLSKTINGSGQGQQTLKFSVAGPSNMAVQGRNYIPGPSYRQQRVSTTVTFNNNSEFAWPGASSWALNGRNSLMNPGPAMASHKEGEDRFFPLSGSLIFGKQGTGRDNVDADKVMITNEEEIKTTNPVATESYGQVATNHQSARAQAQTGWVQNQGILPGMVWQDRDVYLQGPIWAKIPHTDGNFHPSPLMGGFGMKHPPPQILIKNTPVPADPPTAFNKGKLNSFITQYSTGQVSVEIEWELQKENSKRWNPEIQYTSNYYKSNNVEFAVNTEGVYSEPRPIGTRYLTRNL

SEQ ID NO: 1025 - DNA, 2208 bp, synthetic construct
  misc_feature 1..2208: note = Adeno Associated Virus Capsid Protein Variant
  source 1..2208: mol_type = other DNA
atggctgccgatggttatcttccagattggctcgaggacaaccttagtgaaggaattcgcgagtggtgggctttgaaacctggagcccctcaacccaaggcaaatcaacaacatcaagacaacgctcgaggtcttgtgcttccgggttacaaataccttggacccggcaacggactcgacaagggggagccggtcaacgcagcagacgcggcggccctcgagcacgacaaggcctacgaccagcagctcaaggccggagacaacccgtacctcaagtacaaccacgccgacgccgagttccaggagcggctcaaagaagatacgtcttttgggggcaacctcgggcgagcagtcttccaggccaaaaagaggcttcttgaacctcttggtctggttgaggaagcggctaagacggctcctggaaagaagaggcctgtagagcagtctcctcaggaaccggactcctccgcgggtattggcaaatcgggtgcacagcccgctaaaaagagactcaatttcggtcagactggcgacacagagtcagtcccagaccctcaaccaatcggagaacctcccgcagccccctcaggtgtgggatctcttacaatggcttcaggtggtggcgcaccagtggcagacaataacgaaggtgccgatggagtgggtagttcctcgggaaattggcattgcgattcccaatggctgggggacagagtcatcaccaccagcacccgaacctgggccctgcccacctacaacaatcacctctacaagcaaatctccaacagcacatctggaggatcttcaaatgacaacgcctacttcggctacagcaccccctgggggtattttgacttcaacagattccactgccacttctcaccacgtgactggcagcgactcatcaacaacaactggggattccggcctaagcgactcaacttcaagctcttcaacattcaggtcaaagaggttacggacaacaatggagtcaagaccatcgccaataaccttaccagcacggtccaggtcttcacggactcagactatcagctcccgtacgtgctcgggtcggctcacgagggctgcctcccgccgttcccagcggacgttttcatgattcctcagtacgggtatctgacgcttaatgatggaagccaggccgtgggtcgttcgtccttttactgcctggaatatttcccgtcgcaaatgctaagaacgggtaacaacttccagttcagctacgagtttgagaacgtacctttccatagcagctacgctcacagccaaagcctggaccgactaatgaatccactcatcgaccaatacttgtactatctctcaaagactattaacggttctggacagggccaacaaacgctaaaattcagtgtggccggacccagcaacatggctgtccagggaagaaactacatacctggacccagctaccgacaacaacgtgtctcaaccactgtgacttttaacaacaacagcgaatttgcttggcctggagcttcttcttgggctctcaatggacgtaatagcttgatgaatcctggacctgctatggccagccacaaagaaggagaggaccgtttctttcctttgtctggatctttaatttttggcaaacaaggaactggaagagacaacgtggatgcggacaaagtcatgataaccaacgaagacgaaattaaaactactaacccggtagcaacggagtcctatggacaagtggccacaaaccaccagagtgcccgggcacaggcgcagaccggctgggttcaaaaccaaggaatacttccgggtatggtttggcaggacagagatgtgtacctgcaaggacccatttgggccaaaattcctcacacggacggcaactttcacccttctccgctgatgggagggtttggaatgaagcacccgcctcctcagatcctcatcaaaaacacacctgtacctgcggatcctccaacggccttcaacaagggcaagctgaactctttcatcacccagtattctactggccaagtcagcgtggagatcgagtgggagctgcagaaggaaaacagcaagcgctggaacccggagatccagtacacttccaactattacaagtctaataatgttgaatttgctgttaatactgaaggtgtatatagtgaaccccgccccattggcaccagatacctgactcgtaatctg

SEQ ID NO: 1026 - protein, 736 aa, synthetic construct
  REGION 1..736: note = Adeno Associated Virus Capsid Protein Variant
MAADGYLPDWLEDNLSEGIREWWALKPGAPQPKANQQHQDNARGLVLPGYKYLGPGNGLDKGEPVNAADAAALEHDKAYDQQLKAGDNPYLKYNHADAEFQERLKEDTSFGGNLGRAVFQAKKRLLEPLGLVEEAAKTAPGKKRPVEQSPQEPDSSAGIGKSGAQPAKKRLNFGQTGDTESVPDPQPIGEPPAAPSGVGSLTMASGGGAPVADNNEGADGVGSSSGNWHCDSQWLGDRVITTSTRTWALPTYNNHLYKQISNSTSGGSSNDNAYFGYSTPWGYFDFNRFHCHFSPRDWQRLINNNWGFRPKRLNFKLFNIQVKEVTDNNGVKTIANNLTSTVQVFTDSDYQLPYVLGSAHEGCLPPFPADVFMIPQYGYLTLNDGSQAVGRSSFYCLEYFPSQMLRTGNNFQFSYEFENVPFHSSYAHSQSLDRLMNPLIDQYLYYLSKTINGSGQGQQTLKFSVAGPSNMAVQGRNYIPGPSYRQQRVSTTVTFNNNSEFAWPGASSWALNGRNSLMNPGPAMASHKEGEDRFFPLSGSLIFGKQGTGRDNVDADKVMITNEDEIKTTNPVATESYGQVATNHQSARAQAQTGWVQNQGILPGMVWQDRDVYLQGPIWAKIPHTDGNFHPSPLMGGFGMKHPPPQILIKNTPVPADPPTAFNKGKLNSFITQYSTGQVSVEIEWELQKENSKRWNPEIQYTSNYYKSNNVEFAVNTEGVYSEPRPIGTRYLTRNL

SEQ ID NO: 1027 - DNA, 2208 bp, synthetic construct
  misc_feature 1..2208: note = Adeno Associated Virus Capsid Protein Variant
  source 1..2208: mol_type = other DNA
atggctgccgatggttatcttccagattggctcgaggacaaccttagtgaaggaattcgcgagtggtgggctttgaaacctggagcccctcaacccaaggcaaatcaacaacatcaagacaacgctcgaggtcttgtgcttccgggttacaaataccttggacccggcaacggactcgacaagggggagccggtcaacgcagcagacgcggcggccctcgagcacgacaaggcctacgaccagcagctcaaggccggagacaacccgtacctcaagtacaaccacgccgacgccgagttccaggagcggctcaaagaagatacgtcttttgggggcaacctcgggcgagcagtcttccaggccaaaaagaggcttcttgaacctcttggtctggttgaggaagcggctaagacggctcctggaaagaagaggcctgtagagcagtctcctcaggaaccggactcctccgcgggtattggcaaatcgggtgcacagcccgctaaaaagagactcaatttcggtcagactggcgacacagagtcagtcccagaccctcaaccaatcggagaacctcccgcagccccctcaggtgtgggatctcttacaatggcttcaggtggtggcgcaccagtggcagacaataacgaaggtgccgatggagtgggtagttcctcgggaaattggcattgcgattcccaatggctgggggacagagtcatcaccaccagcacccgaacctgggccctgcccacctacaacaatcacctctacaagcaaatctccaacagcacatctatgggatcttcaaatgacaacgcctacttcggctacagcaccccctgggggtattttgacttcaacagattccactgccacttctcaccacgtgactggcagcgactcatcaacaacaactggggattccggcctaagcgactcaacttcaagctcttcaacattcaggtcaaagaggttacggacaacaatggagtcaagaccatcgccaataaccttaccagcacggtccaggtcttcacggactcagactatcagctcccgtacgtgctcgggtcggctcacgagggctgcctcccgccgttcccagcggacgttttcatgattcctcagtacgggtatctgacgcttaatgatggaagccaggccgtgggtcgttcgtccttttactgcctggaatatttcccgtcgcaaatgctaagaacgggtaacaacttccagttcagctacgagtttgagaacgtacctttccatagcagctacgctcacagccaaagcctggaccgactaatgaatccactcatcgaccaatacttgtactatctctcaaagactattaacggttctggacagggccaacaaacgctaaaattcagtgtggccggacccagcaacatggctgtccagggaagaaactacatacctggacccagctaccgacaacaacgtgtctcaaccactgtgacttttaacaacaacagcgaatttgcttggcctggagcttcttcttgggctctcaatggacgtaatagcttgatgaatcctggacctgctatggccagccacaaagaaggagaggaccgtttctttcctttgtctggatctttaatttttggcaaacaaggaactggaagagacaacgtggatgcggacaaagtcatgataaccaacgaagaagaaattaaaactactaacccggtagcaacggagtcctatggacaagtggccacaaaccaccagagtgcccgggcacaggcgcagaccggctgggttcaaaaccaaggaatacttccgggtatggtttggcaggacagagatgtgtacctgcaaggacccatttgggccaaaattcctcacacggacggcaactttcacccttctccgctgatgggagggtttggaatgaagcacccgcctcctcagatcctcatcaaaaacacacctgtacctgcggatcctccaacggccttcaacaagggcaagctgaactctttcatcacccagtattctactggccaagtcagcgtggagatcgagtgggagctgcagaaggaaaacagcaagcgctggaacccggagatccagtacacttccaactattacaagtctaataatgttgaatttgctgttaatactgaaggtgtatatagtgaaccccgccccattggcaccagatacctgactcgtaatctg

SEQ ID NO: 1028 - protein, 736 aa, synthetic construct
  REGION 1..736: note = Adeno Associated Virus Capsid Protein Variant
MAADGYLPDWLEDNLSEGIREWWALKPGAPQPKANQQHQDNARGLVLPGYKYLGPGNGLDKGEPVNAADAAALEHDKAYDQQLKAGDNPYLKYNHADAEFQERLKEDTSFGGNLGRAVFQAKKRLLEPLGLVEEAAKTAPGKKRPVEQSPQEPDSSAGIGKSGAQPAKKRLNFGQTGDTESVPDPQPIGEPPAAPSGVGSLTMASGGGAPVADNNEGADGVGSSSGNWHCDSQWLGDRVITTSTRTWALPTYNNHLYKQISNSTSMGSSNDNAYFGYSTPWGYFDFNRFHCHFSPRDWQRLINNNWGFRPKRLNFKLFNIQVKEVTDNNGVKTIANNLTSTVQVFTDSDYQLPYVLGSAHEGCLPPFPADVFMIPQYGYLTLNDGSQAVGRSSFYCLEYFPSQMLRTGNNFQFSYEFENVPFHSSYAHSQSLDRLMNPLIDQYLYYLSKTINGSGQGQQTLKFSVAGPSNMAVQGRNYIPGPSYRQQRVSTTVTFNNNSEFAWPGASSWALNGRNSLMNPGPAMASHKEGEDRFFPLSGSLIFGKQGTGRDNVDADKVMITNEEEIKTTNPVATESYGQVATNHQSARAQAQTGWVQNQGILPGMVWQDRDVYLQGPIWAKIPHTDGNFHPSPLMGGFGMKHPPPQILIKNTPVPADPPTAFNKGKLNSFITQYSTGQVSVEIEWELQKENSKRWNPEIQYTSNYYKSNNVEFAVNTEGVYSEPRPIGTRYLTRNL

SEQ ID NO: 1029 - DNA, 2208 bp, synthetic construct
  misc_feature 1..2208: note = Adeno Associated Virus Capsid Protein Variant
  source 1..2208: mol_type = other DNA
atggctgccgatggttatcttccagattggctcgaggacaaccttagtgaaggaattcgcgagtggtgggctttgaaacctggagcccctcaacccaaggcaaatcaacaacatcaagacaacgctcgaggtcttgtgcttccgggttacaaataccttggacccggcaacggactcgacaagggggagccggtcaacgcagcagacgcggcggccctcgagcacgacaaggcctacgaccagcagctcaaggccggagacaacccgtacctcaagtacaaccacgccgacgccgagcggcaggagcggctcaaagaagatacgtcttttgggggcaacctcgggcgagcagtcttccaggccaaaaagaggcttcttgaacctcttggtctggttgaggaagcggctaagacggctcctggaaagaagaggcctgtagagcagtctcctcaggaaccggactcctccgcgggtattggcaaatcgggtgcacagcccgctaaaaagagactcaatttcggtcagactggcgacacagagtcagtcccagaccctcaaccaatcggagaacctcccgcagccccctcaggtgtgggatctcttacaatggcttcaggtggtggcgcaccagtggcagacaataacgaaggtgccgatggagtgggtagttcctcgggaaattggcattgcgattcccaatggctgggggacagagtcatcaccaccagcacccgaacctgggccctgcccacctacaacaatcacctctacaagcaaatctccaacagcacatctggaggatcttcaaatgacaacgcctacttcggctacagcaccccctgggggtattttgacttcaacagattccactgccacttctcaccacgtgactggcagcgactcatcaacaacaactggggattccggcctaagcgactcaacttcaagctcttcaacattcaggtcaaagaggttacggacaacaatggagtcaagaccatcgccaataaccttaccagcacggtccaggtcttcacggactcagactatcagctcccgtacgtgctcgggtcggctcacgagggctgcctcccgccgttcccagcggacgttttcatgattcctcagtacgggtatctgacgcttaatgatggaagccaggccgtgggtcgttcgtccttttactgcctggaatatttcccgtcgcaaatgctaagaacgggtaacaacttccagttcagctacgagtttgagaacgtacctttccatagcagctacgctcacagccaaagcctggaccgactaatgaatccactcatcgaccaatacttgtactatctctcaaagactattaacggttctggacagggccaacaaacgctaaaattcagtgtggccggacccagcaacatggctgtccagggaagaaactacatacctggacccagctaccgacaacaacgtgtctcaaccactgtgacttttaacaacaacagcgaatttgcttggcctggagcttcttcttgggctctcaatggacgtaatagcttgatgaatcctggacctgctatggccagccacaaagaaggagaggaccgtttctttcctttgtctggatctttaatttttggcaaacaaggaactggaagagacaacgtggatgcggacaaagtcatgataaccaacgaagaagaaattaaaactactaacccggtagcaacggagtcctatggacaagtggccacaaaccaccagagtgcccgggcacaggcgcagaccggctgggttcaaaaccaaggaatacttccgggtatggtttggcaggacagagatgtgtacctgcaaggacccatttgggccaaaattcctcacacggacggcaactttcacccttctccgctgatgggagggtttggaatgaagcacccgcctcctcagatcctcatcaaaaacacacctgtacctgcggatcctccaacggccttcaacaagggcaagctgaactctttcatcacccagtattctactggccaagtcagcgtggagatcgagtgggagctgcagaaggaaaacagcaagcgctggaacccggagatccagtacacttccaactattacaagtctaataatgttgaatttgctgttaatactgaaggtgtatatagtgaaccccgccccattggcaccagatacctgactcgtaatctg

SEQ ID NO: 1030 - protein, 736 aa, synthetic construct
  REGION 1..736: note = Adeno Associated Virus Capsid Protein Variant
MAADGYLPDWLEDNLSEGIREWWALKPGAPQPKANQQHQDNARGLVLPGYKYLGPGNGLDKGEPVNAADAAALEHDKAYDQQLKAGDNPYLKYNHADAERQERLKEDTSFGGNLGRAVFQAKKRLLEPLGLVEEAAKTAPGKKRPVEQSPQEPDSSAGIGKSGAQPAKKRLNFGQTGDTESVPDPQPIGEPPAAPSGVGSLTMASGGGAPVADNNEGADGVGSSSGNWHCDSQWLGDRVITTSTRTWALPTYNNHLYKQISNSTSGGSSNDNAYFGYSTPWGYFDFNRFHCHFSPRDWQRLINNNWGFRPKRLNFKLFNIQVKEVTDNNGVKTIANNLTSTVQVFTDSDYQLPYVLGSAHEGCLPPFPADVFMIPQYGYLTLNDGSQAVGRSSFYCLEYFPSQMLRTGNNFQFSYEFENVPFHSSYAHSQSLDRLMNPLIDQYLYYLSKTINGSGQGQQTLKFSVAGPSNMAVQGRNYIPGPSYRQQRVSTTVTFNNNSEFAWPGASSWALNGRNSLMNPGPAMASHKEGEDRFFPLSGSLIFGKQGTGRDNVDADKVMITNEEEIKTTNPVATESYGQVATNHQSARAQAQTGWVQNQGILPGMVWQDRDVYLQGPIWAKIPHTDGNFHPSPLMGGFGMKHPPPQILIKNTPVPADPPTAFNKGKLNSFITQYSTGQVSVEIEWELQKENSKRWNPEIQYTSNYYKSNNVEFAVNTEGVYSEPRPIGTRYLTRNL

SEQ ID NO: 1031 - DNA, 2208 bp, synthetic construct
  misc_feature 1..2208: note = Adeno Associated Virus Capsid Protein Variant
  source 1..2208: mol_type = other DNA
atggctgccgatggttatcttccagattggctcgaggacaaccttagtgaaggaattcgcgagtggtgggctttgaaacctggagcccctcaacccaaggcaaatcaacaacatcaagacaacgctcgaggtcttgtgcttccgggttacaaataccttggacccggcaacggactcgacaagggggagccggtcaacgcagcagacgcggcggccctcgagcacgacaaggcctacgaccagcagctcaaggccggagacaacccgtacctcaagtacaaccacgccgacgccgagttccaggagcggctcaaagaagatacgtcttttgggggcaacctcgggcgagcagtcttccaggccaaaaagaggcttcttgaacctcttggtctggttgaggaagcggctaagacggctcctggaaagaagaggcctgtagagcagtctcctcaggaaccggactcctccgcgggtattggcaaatcgggtgcacagcccgctaaaaagagactcaatttcggtcagactggcgacacagagtcagtcccagaccctcaaccaatcggaagtcctcccgcagccccctcaggtgtgggatctcttacaatggcttcaggtggtggcgcaccagtggcagacaataacgaaggtgccgatggagtgggtagttcctcgggaaattggcattgcgattcccaatggctgggggacagagtcatcaccaccagcacccgaacctgggccctgcccacctacaacaatcacctctacaagcaaatctccaacagcacatctggaggatcttcaaatgacaacgcctacttcggctacagcaccccctgggggtattttgacttcaacagattccactgccacttctcaccacgtgactggcagcgactcatcaacaacaactggggattccggcctaagcgactcaacttcaagctcttcaacattcaggtcaaagaggttacggacaacaatggagtcaagaccatcgccaataaccttaccagcacggtccaggtcttcacggactcagactatcagctcccgtacgtgctcgggtcggctcacgagggctgcctcccgccgttcccagcggacgttttcatgattcctcagtacgggtatctgacgcttaatgatggaagccaggccgtgggtcgttcgtccttttactgcctggaatatttcccgtcgcaaatgctaagaacgggtaacaacttccagttcagctacgagtttgagaacgtacctttccatagcagctacgctcacagccaaagcctggaccgactaatgaatccactcatcgaccaatacttgtactatctctcaaagactattaacggttctggacagggccaacaaacgctaaaattcagtgtggccggacccagcaacatggctgtccagggaagaaactacatacctggacccagctaccgacaacaacgtgtctcaaccactgtgacttttaacaacaacagcgaatttgcttggcctggagcttcttcttgggctctcaatggacgtaatagcttgatgaatcctggacctgctatggccagccacaaagaaggagaggaccgtttctttcctttgtctggatctttaatttttggcaaacaaggaactggaagagacaacgtggatgcggacaaagtcatgataaccaacgaagaagaaattaaaactactaacccggtagcaacggagtcctatggacaagtggccacaaaccaccagagtgcccgggcacaggcgcagaccggctgggttcaaaaccaaggaatacttccgggtatggtttggcaggacagagatgtgtacctgcaaggacccatttgggccaaaattcctcacacggacggcaactttcacccttctccgctgatgggagggtttggaatgaagcacccgcctcctcagatcctcatcaaaaacacacctgtacctgcggatcctccaacggccttcaacaagggcaagctgaactctttcatcacccagtattctactggccaagtcagcgtggagatcgagtgggagctgcagaaggaaaacagcaagcgctggaacccggagatccagtacacttccaactattacaagtctaataatgttgaatttgctgttaatactgaaggtgtatatagtgaaccccgccccattggcaccagatacctgactcgtaatctg

SEQ ID NO: 1032 - protein, 736 aa, synthetic construct
  REGION 1..736: note = Adeno Associated Virus Capsid Protein Variant
MAADGYLPDWLEDNLSEGIREWWALKPGAPQPKANQQHQDNARGLVLPGYKYLGPGNGLDKGEPVNAADAAALEHDKAYDQQLKAGDNPYLKYNHADAEFQERLKEDTSFGGNLGRAVFQAKKRLLEPLGLVEEAAKTAPGKKRPVEQSPQEPDSSAGIGKSGAQPAKKRLNFGQTGDTESVPDPQPIGSPPAAPSGVGSLTMASGGGAPVADNNEGADGVGSSSGNWHCDSQWLGDRVITTSTRTWALPTYNNHLYKQISNSTSGGSSNDNAYFGYSTPWGYFDFNRFHCHFSPRDWQRLINNNWGFRPKRLNFKLFNIQVKEVTDNNGVKTIANNLTSTVQVFTDSDYQLPYVLGSAHEGCLPPFPADVFMIPQYGYLTLNDGSQAVGRSSFYCLEYFPSQMLRTGNNFQFSYEFENVPFHSSYAHSQSLDRLMNPLIDQYLYYLSKTINGSGQGQQTLKFSVAGPSNMAVQGRNYIPGPSYRQQRVSTTVTFNNNSEFAWPGASSWALNGRNSLMNPGPAMASHKEGEDRFFPLSGSLIFGKQGTGRDNVDADKVMITNEEEIKTTNPVATESYGQVATNHQSARAQAQTGWVQNQGILPGMVWQDRDVYLQGPIWAKIPHTDGNFHPSPLMGGFGMKHPPPQILIKNTPVPADPPTAFNKGKLNSFITQYSTGQVSVEIEWELQKENSKRWNPEIQYTSNYYKSNNVEFAVNTEGVYSEPRPIGTRYLTRNL

SEQ ID NO: 1033 - DNA, 2208 bp, synthetic construct
  misc_feature 1..2208: note = Adeno Associated Virus Capsid Protein Variant
  source 1..2208: mol_type = other DNA
atggctgccgatggttatcttccagattggctcgaggacaaccttagtgaaggaattcgcgagtggtgggctttgaaacctggagcccctcaacccaaggcaaatcaacaacatcaagacaacgctcgaggtcttgtgcttccgggttacaaataccttggacccggcaacggactcgacaagggggagccggtcaacgcagcagacgcggcggccctcgagcacgacaaggcctacgaccagcagctcaaggccggagacaacccgtacctcaagtacaaccacgccgacgccgagttccaggagcggctcaaagaagatacgtcttttgggggcaacctcgggcgagcagtcttccaggccaaaaagaggcttcttgaacctcttggtctggttgaggaagcggctaagacggctcctggaaagaagaggcctgtagagcagtctcctcaggaaccggactcctccgcgggtattggcaaatcgggtgcacagcccgctaaaaagagactcaatttcggtcagactggcgacacagagtcagtcccagaccctcaaccaatcggagaacctcccgcagccccctcaggtgtgggatctcttacaatggcttcaggtggtggcgcaccagtggcagacaataacgaaggtgccgatggagtgggtagttcctcgggaaattggcattgcgattcccaatggctgggggacagagtcatcaccaccagcacccgaacctgggccctgcccacctacaacaatcacctctacaagcaaatctccaacagcacatctggaggatcttcaaatgacaacgcctacttcggctacagcaccccctgggggtattttgacttcaacagattccactgccacttctcaccacgtgactggcagcgactcatcaacaacaactggggattccggcctaagcgactcaacttcaagctcttcaacattcaggtcaaagaggttacggacaacaatggagtcaagaccatcgccaataaccttaccagcacggtccaggtcttcacggactcagactatcagctcccgtacgtgctcgggtcggctcacgagggctgcctcccgccgttcccagcggacgttttcatgattcctcagtacgggtatctgacgcttaatgatggaagccaggccgtgggtcgttcgtccttttactgcctggaatatttcccgtcgcaaatgctaagaacgggtaacaacttccagttcagctacgagtttgagaacgtacctttccatagcagctacgctcacagccaaagcctggaccgactaatgaatccactcatcgaccaatacttgtactatctctcaaagactattaacggttctggacagggccaacaaacgctaaaattcagtgtggccggacccagcaacatggctgtccagggaagaaactacatacctggacccagctaccgacaacaacgtgtctcaaccactgtgacttttaacaacaacagcgaatttgcttggcctggagcttcttcttgggctctcaatggacgtaatagcttgatgaatcctggacctgctatggccagccacaaagaaggagaggaccgtttctttcctttgtctggatctttaatttttggcaaacaaggaactggaagagacaacgtggatgcggacaaagtcatgataaccaacgaagaagaaattaaaactactaacccggtagcaacggagtcctatggacaagtggccacaaaccaccagagtgcccgggcacaggcgcagaccggctgggttcaaaaccaaggaatacttccgggtatggtttggcaggacagagatgtgtacctgcaaggacccatttgggccaaaattcctcacacggacggcaactttcacccttctccgctgatgggagggtttggaatgaagcacccgcctcctcagatcctcatcaaaaacacacctgtacctgcggatcctccaacggccttcaacaagggcaagctgaactctttcatcacccagtattctactggccaagtcagcgtggagatcgagtgggagctgcagaaggaaaacagcaagcgctggaacccggagatccagtacacttccaactattacaagtctaataatgttgaatttgctgttaatactgaaggtgtatatagtgaaccctggcccattggcaccagatacctgactcgtaatctg

SEQ ID NO: 1034 - protein, 736 aa, synthetic construct
  REGION 1..736: note = Adeno Associated Virus Capsid Protein Variant
MAADGYLPDWLEDNLSEGIREWWALKPGAPQPKANQQHQDNARGLVLPGYKYLGPGNGLDKGEPVNAADAAALEHDKAYDQQLKAGDNPYLKYNHADAEFQERLKEDTSFGGNLGRAVFQAKKRLLEPLGLVEEAAKTAPGKKRPVEQSPQEPDSSAGIGKSGAQPAKKRLNFGQTGDTESVPDPQPIGEPPAAPSGVGSLTMASGGGAPVADNNEGADGVGSSSGNWHCDSQWLGDRVITTSTRTWALPTYNNHLYKQISNSTSGGSSNDNAYFGYSTPWGYFDFNRFHCHFSPRDWQRLINNNWGFRPKRLNFKLFNIQVKEVTDNNGVKTIANNLTSTVQVFTDSDYQLPYVLGSAHEGCLPPFPADVFMIPQYGYLTLNDGSQAVGRSSFYCLEYFPSQMLRTGNNFQFSYEFENVPFHSSYAHSQSLDRLMNPLIDQYLYYLSKTINGSGQGQQTLKFSVAGPSNMAVQGRNYIPGPSYRQQRVSTTVTFNNNSEFAWPGASSWALNGRNSLMNPGPAMASHKEGEDRFFPLSGSLIFGKQGTGRDNVDADKVMITNEEEIKTTNPVATESYGQVATNHQSARAQAQTGWVQNQGILPGMVWQDRDVYLQGPIWAKIPHTDGNFHPSPLMGGFGMKHPPPQILIKNTPVPADPPTAFNKGKLNSFITQYSTGQVSVEIEWELQKENSKRWNPEIQYTSNYYKSNNVEFAVNTEGVYSEPWPIGTRYLTRNL

SEQ ID NO: 1035 - DNA, 2208 bp, synthetic construct
  misc_feature 1..2208: note = Adeno Associated Virus Capsid Protein Variant
  source 1..2208: mol_type = other DNA
atggctgccgatggttatcttccagattggctcgaggacaaccttagtgaaggaattcgcgagtggtgggctttgaaacctggagcccctcaacccaaggcaaatcaacaacatcaagacaacgctcgaggtcttgtgcttccgggttacaaataccttggacccggcaacggactcgacaagggggagccggtcaacgcagcagacgcggcggccctcgagcacgacaaggcctacgaccagcagctcaaggccggagacaacccgtacctcaagtacaaccacgccgacgccgagttccaggagcggctcaaagaagatacgtcttttgggggcaacctcgggcgagcagtcttccaggccaaaaagaggcttcttgaacctcttggtctggttgaggaagcggctaagacggctcctggaaagaagaggcctgtagagcagtctcctcaggaaccggactcctccgcgggtattggcaaatcgggtgcacagcccgctaaaaagagactcaatttcggtcagactggcgacacagagtcagtcccagaccctcaaccaatcggagaacctcccgcagccccctcaggtgtgggatctcttacaatggcttcaggtggtggcgcaccagtggcagacaataacgaaggtgccgatggagtgggtagttcctcgggaaattggcattgcgattcccaatggctgggggacagagtcatcaccaccagcacccgaacctgggccctgcccacctacaacaatcacctctacaagcaaatctccaacagcacatctggaggatcttcacaggacaacgcctacttcggctacagcaccccctgggggtattttgacttcaacagattccactgccacttctcaccacgtgactggcagcgactcatcaacaacaactggggattccggcctaagcgactcaacttcaagctcttcaacattcaggtcaaagaggttacggacaacaatggagtcaagaccatcgccaataaccttaccagcacggtccaggtcttcacggactcagactatcagctcccgtacgtgctcgggtcggctcacgagggctgcctcccgccgttcccagcggacgttttcatgattcctcagtacgggtatctgacgcttaatgatggaagccaggccgtgggtcgttcgtccttttactgcctggaatatttcccgtcgcaaatgctaagaacgggtaacaacttccagttcagctacgagtttgagaacgtacctttccatagcagctacgctcacagccaaagcctggaccgactaatgaatccactcatcgaccaatacttgtactatctctcaaagactattaacggttctggacagggccaacaaacgctaaaattcagtgtggccggacccagcaacatggctgtccagggaagaaactacatacctggacccagctaccgacaacaacgtgtctcaaccactgtgacttttaacaacaacagcgaatttgcttggcctggagcttcttcttgggctctcaatggacgtaatagcttgatgaatcctggacctgctatggccagccacaaagaaggagaggaccgtttctttcctttgtctggatctttaatttttggcaaacaaggaactggaagagacaacgtggatgcggacaaagtcatgataaccaacgaagaagaaattaaaactactaacccggtagcaacggagtcctatggacaagtggccacaaaccaccagagtgcccgggcacaggcgcagaccggctgggttcaaaaccaaggaatacttccgggtatggtttggcaggacagagatgtgtacctgcaaggacccatttgggccaaaattcctcacacggacggcaactttcacccttctccgctgatgggagggtttggaatgaagcacccgcctcctcagatcctcatcaaaaacacacctgtacctgcggatcctccaacggccttcaacaagggcaagctgaactctttcatcacccagtattctactggccaagtcagcgtggagatcgagtgggagctgcagaaggaaaacagcaagcgctggaacccggagatccagtacacttccaactattacaagtctaataatgttgaatttgctgttaatactgaaggtgtatatagtgaaccccgccccattggcaccagatacctgactcgtaatctg

SEQ ID NO: 1036 - protein, 736 aa, synthetic construct
  REGION 1..736: note = Adeno Associated Virus Capsid Protein Variant
MAADGYLPDWLEDNLSEGIREWWALKPGAPQPKANQQHQDNARGLVLPGYKYLGPGNGLDKGEPVNAADAAALEHDKAYDQQLKAGDNPYLKYNHADAEFQERLKEDTSFGGNLGRAVFQAKKRLLEPLGLVEEAAKTAPGKKRPVEQSPQEPDSSAGIGKSGAQPAKKRLNFGQTGDTESVPDPQPIGEPPAAPSGVGSLTMASGGGAPVADNNEGADGVGSSSGNWHCDSQWLGDRVITTSTRTWALPTYNNHLYKQISNSTSGGSSQDNAYFGYSTPWGYFDFNRFHCHFSPRDWQRLINNNWGFRPKRLNFKLFNIQVKEVTDNNGVKTIANNLTSTVQVFTDSDYQLPYVLGSAHEGCLPPFPADVFMIPQYGYLTLNDGSQAVGRSSFYCLEYFPSQMLRTGNNFQFSYEFENVPFHSSYAHSQSLDRLMNPLIDQYLYYLSKTINGSGQGQQTLKFSVAGPSNMAVQGRNYIPGPSYRQQRVSTTVTFNNNSEFAWPGASSWALNGRNSLMNPGPAMASHKEGEDRFFPLSGSLIFGKQGTGRDNVDADKVMITNEEEIKTTNPVATESYGQVATNHQSARAQAQTGWVQNQGILPGMVWQDRDVYLQGPIWAKIPHTDGNFHPSPLMGGFGMKHPPPQILIKNTPVPADPPTAFNKGKLNSFITQYSTGQVSVEIEWELQKENSKRWNPEIQYTSNYYKSNNVEFAVNTEGVYSEPRPIGTRYLTRNL

SEQ ID NO: 1037 - DNA, 2208 bp, synthetic construct
  misc_feature 1..2208: note = Adeno Associated Virus Capsid Protein Variant
  source 1..2208: mol_type = other DNA
atggctgccgatggttatcttccagattggctcgaggacaaccttagtgaaggaattcgcgagtggtgggctttgaaacctggagcccctcaacccaaggcaaatcaacaacatcaagacaacgctcgaggtcttgtgcttccgggttacaaataccttggacccggcaacggactcgacaagggggagccggtcaacgcagcagacgcggcggccctcgagcacgacaaggcctacgaccagcagctcaaggccggagacaacccgtacctcaagtacaaccacgccgacgccgagttccaggagcggctcaaagaagatacgtcttttgggggcaacctcgggcgagcagtcttccaggccaaaaagaggcttcttgaacctcttggtctggttgaggaagcggctaagacggctcctggaaagaagaggcctgtagagcagtctcctcaggaaccggactcctccgcgggtattggcaaatcgggtgcacagcccgctaaaaagagactcaatttcggtcagactggcgacacagagtcagtcccagaccctcaaccaatcggagaacctcccgcagccccctcaggtgtgggatctcttacaatggcttcaggtggtggcgcaccagtggcagacaataacgaaggtgccgatggagtgggtagttcctcgggaaattggcattgcgattcccaatggctgggggacagagtcatcaccaccagcacccgaacctgggccctgcccacctacaacaatcacctctacaagcaaatctccaacagcacatctggaggatcttcaaatgacaacgcctacttcggctacagcaccccctgggggtattttgacttcaacagattccactgccacttctcaccacgtgactggcagcgactcatcaacaacaactggggattccggcctaagcgactcaacttcaagctcttcaacattcaggtcaaagaggttacggacaacaatggagtcaagaccatcgccaataaccttaccagcacggtccaggtcttcacggactcagactatcagctcccgtacgtgctcgggtcggctcacgagggctgcctcccgccgttcccagcggacgttttcatgattcctcagtacgggtatctgacgcttaatgatggaagccaggcccctggtcgttcgtccttttactgcctggaatatttcccgtcgcaaatgctaagaacgggtaacaacttccagttcagctacgagtttgagaacgtacctttccatagcagctacgctcacagccaaagcctggaccgactaatgaatccactcatcgaccaatacttgtactatctctcaaagactattaacggttctggacagggccaacaaacgctaaaattcagtgtggccggacccagtaacatggctgtccagggaagaaactacatacctggacccagctaccgacaacaacgtgtctcaaccactgtgacttttaacaacaacagcgaatttgcttggcctggagcttcttcttgggctctcaatggacgtaatagcttgatgaatcctggacctgctatggccagccacaaagaaggagaggaccgtttctttcctttgtctggatctttaatttttggcaaacaaggaactggaagagacaacgtggatgcggacaaagtcatgataaccaacgaagaagaaattaaaactactaacccggtagcaacggagtcctatggacaagtggccacaaaccaccagagtgcccgggcacaggcgcagaccggctgggttcaaaaccaaggaatacttccgggtatggtttggcaggacagagatgtgtacctgcaaggacccatttgggccaaaattcctcacacggacggcaactttcacccttctccgctgatgggagggtttggaatgaagcacccgcctcctcagatcctcatcaaaaacacacctgtacctgcggatcctccaacggccttcaacaagggcaagctgaactctttcatcacccagtattctactggccaagtcagcgtggagatcgagtgggagctgcagaaggaaaacagcaagcgctggaacccggagatccagtacacttccaactattacaagtctaataatgttgaatttgctgttaatactgaaggtgtatatagtgaaccccgccccattggcaccagatacctgactcgtaatctg

SEQ ID NO: 1038 - protein, 736 aa, synthetic construct
  REGION 1..736: note = Adeno Associated Virus Capsid Protein Variant
MAADGYLPDWLEDNLSEGIREWWALKPGAPQPKANQQHQDNARGLVLPGYKYLGPGNGLDKGEPVNAADAAALEHDKAYDQQLKAGDNPYLKYNHADAEFQERLKEDTSFGGNLGRAVFQAKKRLLEPLGLVEEAAKTAPGKKRPVEQSPQEPDSSAGIGKSGAQPAKKRLNFGQTGDTESVPDPQPIGEPPAAPSGVGSLTMASGGGAPVADNNEGADGVGSSSGNWHCDSQWLGDRVITTSTRTWALPTYNNHLYKQISNSTSGGSSNDNAYFGYSTPWGYFDFNRFHCHFSPRDWQRLINNNWGFRPKRLNFKLFNIQVKEVTDNNGVKTIANNLTSTVQVFTDSDYQLPYVLGSAHEGCLPPFPADVFMIPQYGYLTLNDGSQAPGRSSFYCLEYFPSQMLRTGNNFQFSYEFENVPFHSSYAHSQSLDRLMNPLIDQYLYYLSKTINGSGQGQQTLKFSVAGPSNMAVQGRNYIPGPSYRQQRVSTTVTFNNNSEFAWPGASSWALNGRNSLMNPGPAMASHKEGEDRFFPLSGSLIFGKQGTGRDNVDADKVMITNEEEIKTTNPVATESYGQVATNHQSARAQAQTGWVQNQGILPGMVWQDRDVYLQGPIWAKIPHTDGNFHPSPLMGGFGMKHPPPQILIKNTPVPADPPTAFNKGKLNSFITQYSTGQVSVEIEWELQKENSKRWNPEIQYTSNYYKSNNVEFAVNTEGVYSEPRPIGTRYLTRNL

SEQ ID NO: 1039 - DNA, 2208 bp, synthetic construct
  misc_feature 1..2208: note = Adeno Associated Virus Capsid Protein Variant
  source 1..2208: mol_type = other DNA
atggctgccgatggttatcttccagattggctcgaggacaaccttagtgaaggaattcgcgagtggtgggctttgaaacctggagcccctcaacccaaggcaaatcaacaacatcaagacaacgctcgaggtcttgtgcttccgggttacaaataccttggacccggcaacggactcgacaagggggagccggtccgagcagcagacgcggcggccctcgagcacgacaaggcctacgaccagcagctcaaggccggagacaacccgtacctcaagtacaaccacgccgacgccgagttccaggagcggctcaaagaagatacgtcttttgggggcaacctcgggcgagcagtcttccaggccaaaaagaggcttcttgaacctcttggtctggttgaggaagcggctaagacggctcctggaaagaagaggcctgtagagcagtctcctcaggaaccggactcctccgcgggtattggcaaatcgggtgcacagcccgctaaaaagagactcaatttcggtcagactggcgacacagagtcagtcccagaccctcaaccaatcggagaacctcccgcagccccctcaggtgtgggatctcttacaatggcttcaggtggtggcgcaccagtggcagacaataacgaaggtgccgatggagtgggtagttcctcgggaaattggcattgcgattcccaatggctgggggacagagtcatcaccaccagcacccgaacctgggccctgcccacctacaacaatcacctctacaagcaaatctccaacagcacatctggaggatcttcaaatgacaacgcctacttcggctacagcaccccctgggggtattttgacttcaacagattccactgccacttctcaccacgtgactggcagcgactcatcaacaacaactggggattccggcctaagcgactcaacttcaagctcttcaacattcaggtcaaagaggttacggacaacaatggagtcaagaccatcgccaataaccttaccagcacggtccaggtcttcacggactcagactatcagctcccgtacgtgctcgggtcggctcacgagggctgcctcccgccgttcccagcggacgttttcatgattcctcagtacgggtatctgacgcttaatgatggaagccaggccgtgggtcgttcgtccttttactgcctggaatatttcccgtcgcaaatgctaagaacgggtaacaacttccagttcagctacgagtttgagaacgtacctttccatagcagctacgctcacagccaaagcctggaccgactaatgaatccactcatcgaccaatacttgtactatctctcaaagactattaacggttctggacagggccaacaaacgctaaaattcagtgtggccggacccagcaacatggctgtccagggaagaaactacatacctggacccagctaccgacaacaacgtgtctcaaccactgtgacttttaacaacaacagcgaatttgcttggcctggagcttcttcttgggctctcaatggacgtaatagcttgatgaatcctggacctgctatggccagccacaaagaaggagaggaccgtttctttcctttgtctggatctttaatttttggcaaacaaggaactggaagagacaacgtggatgcggacaaagtcatgataaccaacgaagaagaaattaaaactactaacccggtagcaacggagtcctatggacaagtggccacaaaccaccagagtgcccgggcacaggcgcagaccggctgggttcaaaaccaaggaatacttccgggtatggtttggcaggacagagatgtgtacctgcaaggacccatttgggccaaaattcctcacacggacggcaactttcacccttctccgctgatgggagggtttggaatgaagcacccgcctcctcagatcctcatcaaaaacacacctgtacctgcggatcctccaacggccttcaacaagggcaagctgaactctttcatcacccagtattctactggccaagtcagcgtggagatcgagtgggagctgcagaaggaaaacagcaagcgctggaacccggagatccagtacacttccaactattacaagtctaataatgttgaatttgctgttaatactgaaggtgtatatagtgaaccccgccccattggcaccagatacctgactcgtaatctg

SEQ ID NO: 1040 - protein, 736 aa, synthetic construct
  REGION 1..736: note = Adeno Associated Virus Capsid Protein Variant
MAADGYLPDWLEDNLSEGIREWWALKPGAPQPKANQQHQDNARGLVLPGYKYLGPGNGLDKGEPVRAADAAALEHDKAYDQQLKAGDNPYLKYNHADAEFQERLKEDTSFGGNLGRAVFQAKKRLLEPLGLVEEAAKTAPGKKRPVEQSPQEPDSSAGIGKSGAQPAKKRLNFGQTGDTESVPDPQPIGEPPAAPSGVGSLTMASGGGAPVADNNEGADGVGSSSGNWHCDSQWLGDRVITTSTRTWALPTYNNHLYKQISNSTSGGSSNDNAYFGYSTPWGYFDFNRFHCHFSPRDWQRLINNNWGFRPKRLNFKLFNIQVKEVTDNNGVKTIANNLTSTVQVFTDSDYQLPYVLGSAHEGCLPPFPADVFMIPQYGYLTLNDGSQAVGRSSFYCLEYFPSQMLRTGNNFQFSYEFENVPFHSSYAHSQSLDRLMNPLIDQYLYYLSKTINGSGQGQQTLKFSVAGPSNMAVQGRNYIPGPSYRQQRVSTTVTFNNNSEFAWPGASSWALNGRNSLMNPGPAMASHKEGEDRFFPLSGSLIFGKQGTGRDNVDADKVMITNEEEIKTTNPVATESYGQVATNHQSARAQAQTGWVQNQGILPGMVWQDRDVYLQGPIWAKIPHTDGNFHPSPLMGGFGMKHPPPQILIKNTPVPADPPTAFNKGKLNSFITQYSTGQVSVEIEWELQKENSKRWNPEIQYTSNYYKSNNVEFAVNTEGVYSEPRPIGTRYLTRNL

SEQ ID NO: 1041 - DNA, 2208 bp, synthetic construct
  misc_feature 1..2208: note = Adeno Associated Virus Capsid Protein Variant
  source 1..2208: mol_type = other DNA
atggctgccgatggttatcttccagattggctcgaggacaaccttagtgaaggaattcgcgagtggtgggctttgaaacctggagcccctcaacccaaggcaaatcaacaacatcaagacaacgctcgaggtcttgtgcttccgggttacaaataccttggacccggcaacggactcgacaagggggagccggtcaacgcagcagacgcggcggccctcgagcacgacaaggcctacgaccagcagctcaaggccggagacaacccgtacctcaagtacaaccacgccgacgccgaggttcaggagcggctcaaagaagatacgtcttttgggggcaacctcgggcgagcagtcttccaggccaaaaagaggcttcttgaacctcttggtctggttgaggaagcggctaagacggctcctggaaagaagaggcctgtagagcagtctcctcaggaaccggactcctccgcgggtattggcaaatcgggtgcacagcccgctaaaaagagactcaatttcggtcagactggcgacacagagtcagtcccagaccctcaaccaatcggagaacctcccgcagccccctcaggtgtgggatctcttacaatggcttcaggtggtggcgcaccagtggcagacaataacgaaggtgccgatggagtgggtagttcctcgggaaattggcattgcgattcccaatggctgggggacagagtcatcaccaccagcacccgaacctgggccctgcccacctacaacaatcacctctacaagcaaatctccaacagcacatctggaggatcttcaaatgacaacgcctacttcggctacagcaccccctgggggtattttgacttcaacagattccactgccacttctcaccacgtgactggcagcgactcatcaacaacaactggggattccggcctaagcgactcaacttcaagctcttcaacattcaggtcaaagaggttacggacaacaatggagtcaagaccatcgccaataaccttaccagcacggtccaggtcttcacggactcagactatcagctcccgtacgtgctcgggtcggctcacgagggctgcctcccgccgttcccagcggacgttttcatgattcctcagtacgggtatctgacgcttaatgatggaagccaggccgtgggtcgttcgtccttttactgcctggaatatttcccgtcgcaaatgctaagaacgggtaacaacttccagttcagctacgagtttgagaacgtacctttccatagcagctacgctcacagccaaagcctggaccgactaatgaatccactcatcgaccaatacttgtactatctctcaaagactattaacggttctggacagggccaacaaacgctaaaattcagtgtggccggacccagcaacatggctgtccagggaagaaactacatacctggacccagctaccgacaacaacgtgtctcaaccactgtgacttttaacaacaacagcgaatttgcttggcctggagcttcttcttgggctctcaatggacgtaatagcttgatgaatcctggacctgctatggccagccacaaagaaggagaggaccgtttctttcctttgtctggatctttaatttttggcaaacaaggaactggaagagacaacgtggatgcggacaaagtcatgataaccaacgaagaagaaattaaaactactaacccggtagcaacggagtcctatggacaagtggccacaaaccaccagagtgcccgggcacaggcgcagaccggctgggttcaaaaccaaggaatacttccgggtatggtttggcaggacagagatgtgtacctgcaaggacccatttgggccaaaattcctcacacggacggcaactttcacccttctccgctgatgggagggtttggaatgaagcacccgcctcctcagatcctcatcaaaaacacacctgtacctgcggatcctccaacggccttcaacaagggcaagctgaactctttcatcacccagtattctactggccaagtcagcgtggagatcgagtgggagctgcagaaggaaaacagcaagcgctggaacccggagatccagtacacttccaactattacaagtctaataatgttgaatttgctgttaatactgaaggtgtatatagtgaaccccgccccattggcaccagatacctgactcgtaatctg

SEQ ID NO: 1042 - protein, 736 aa, synthetic construct
  REGION 1..736: note = Adeno Associated Virus Capsid Protein Variant
MAADGYLPDWLEDNLSEGIREWWALKPGAPQPKANQQHQDNARGLVLPGYKYLGPGNGLDKGEPVNAADAAALEHDKAYDQQLKAGDNPYLKYNHADAEVQERLKEDTSFGGNLGRAVFQAKKRLLEPLGLVEEAAKTAPGKKRPVEQSPQEPDSSAGIGKSGAQPAKKRLNFGQTGDTESVPDPQPIGEPPAAPSGVGSLTMASGGGAPVADNNEGADGVGSSSGNWHCDSQWLGDRVITTSTRTWALPTYNNHLYKQISNSTSGGSSNDNAYFGYSTPWGYFDFNRFHCHFSPRDWQRLINNNWGFRPKRLNFKLFNIQVKEVTDNNGVKTIANNLTSTVQVFTDSDYQLPYVLGSAHEGCLPPFPADVFMIPQYGYLTLNDGSQAVGRSSFYCLEYFPSQMLRTGNNFQFSYEFENVPFHSSYAHSQSLDRLMNPLIDQYLYYLSKTINGSGQGQQTLKFSVAGPSNMAVQGRNYIPGPSYRQQRVSTTVTFNNNSEFAWPGASSWALNGRNSLMNPGPAMASHKEGEDRFFPLSGSLIFGKQGTGRDNVDADKVMITNEEEIKTTNPVATESYGQVATNHQSARAQAQTGWVQNQGILPGMVWQDRDVYLQGPIWAKIPHTDGNFHPSPLMGGFGMKHPPPQILIKNTPVPADPPTAFNKGKLNSFITQYSTGQVSVEIEWELQKENSKRWNPEIQYTSNYYKSNNVEFAVNTEGVYSEPRPIGTRYLTRNL

SEQ ID NO: 1043 - DNA, 2208 bp, synthetic construct
  misc_feature 1..2208: note = Adeno Associated Virus Capsid Protein Variant
  source 1..2208: mol_type = other DNA
atggctgccgatggttatcttccagattggctcgaggacaaccttagtgaaggaattcgcgagtggtgggctttgaaacctggagcccctcaacccaaggcaaatcaacaacatcaagacaacgctcgaggtcttgtgcttccgggttacaaataccttggacccggcaacggactcgacaagggggagccggtcaacgcagcagacgcggcggccctcgagcacgacaaggcctacgaccagcagctcaaggccggagacaacccgtacctcaagtacaaccacgccgacgccgagttccaggagcggctcaaagaagatacgtcttttgggggcaacctcgggcgagcagtcttccaggccaaaaagaggcttcttgaacctcttggtctggttgaggaagcggctaagacggctcctggaaagaagaggcctgtagagcagtctcctcaggaaccggactcctccgcgggtattggcaaatcgggtgcacagcccgctaaaaagagactcaatttcggtcagactggcgacacagagtcagtcccagaccctcaaccaatcggagaacctcccgcagccccctcaggtgtgggatctcttacaatggcttcaggtggtggcgcaccagtggcagacaataacgaaggtgccgatggagtgggtagttcctcgggaaattggcattgcgattcccaatggctgggggacagagtcatcaccaccagcacccgaacctgggccctgcccacctacaacaatcacctctacaagcaaatctccaacagcacatctcaaggatcttcaaatgacaacgcctacttcggctacagcaccccctgggggtattttgacttcaacagattccactgccacttctcaccacgtgactggcagcgactcatcaacaacaactggggattccggcctaagcgactcaacttcaagctcttcaacattcaggtcaaagaggttacggacaacaatggagtcaagaccatcgccaataaccttaccagcacggtccaggtcttcacggactcagactatcagctcccgtacgtgctcgggtcggctcacgagggctgcctcccgccgttcccagcggacgttttcatgattcctcagtacgggtatctgacgcttaatgatggaagccaggccgtgggtcgttcgtccttttactgcctggaatatttcccgtcgcaaatgctaagaacgggtaacaacttccagttcagctacgagtttgagaacgtacctttccatagcagctacgctcacagccaaagcctggaccgactaatgaatccactcatcgaccaatacttgtactatctctcaaagactattaacggttctggacagggccaacaaacgctaaaattcagtgtggccggacccagcaacatggctgtccagggaagaaactacatacctggacccagctaccgacaacaacgtgtctcaaccactgtgacttttaacaacaacagcgaatttgcttggcctggagcttcttcttgggctctcaatggacgtaatagcttgatgaatcctggacctgctatggccagccacaaagaaggagaggaccgtttctttcctttgtctggatctttaatttttggcaaacaaggaactggaagagacaacgtggatgcggacaaagtcatgataaccaacgaagaagaaattaaaactactaacccggtagcaacggagtcctatggacaagtggccacaaaccaccagagtgcccgggcacaggcgcagaccggctgggttcaaaaccaaggaatacttccgggtatggtttggcaggacagagatgtgtacctgcaaggacccatttgggccaaaattcctcacacggacggcaactttcacccttctccgctgatgggagggtttggaatgaagcacccgcctcctcagatcctcatcaaaaacacacctgtacctgcggatcctccaacggccttcaacaagggcaagctgaactctttcatcacccagtattctactggccaagtcagcgtggagatcgagtgggagctgcagaaggaaaacagcaagcgctggaacccggagatccagtacacttccaactattacaagtctaataatgttgaatttgctgttaatactgaaggtgtatatagtgaaccccgccccattggcaccagatacctgactcgtaatctg

SEQ ID NO: 1044 - protein, 736 aa, synthetic construct
  REGION 1..736: note = Adeno Associated Virus Capsid Protein Variant
MAADGYLPDWLEDNLSEGIREWWALKPGAPQPKANQQHQDNARGLVLPGYKYLGPGNGLDKGEPVNAADAAALEHDKAYDQQLKAGDNPYLKYNHADAEFQERLKEDTSFGGNLGRAVFQAKKRLLEPLGLVEEAAKTAPGKKRPVEQSPQEPDSSAGIGKSGAQPAKKRLNFGQTGDTESVPDPQPIGEPPAAPSGVGSLTMASGGGAPVADNNEGADGVGSSSGNWHCDSQWLGDRVITTSTRTWALPTYNNHLYKQISNSTSQGSSNDNAYFGYSTPWGYFDFNRFHCHFSPRDWQRLINNNWGFRPKRLNFKLFNIQVKEVTDNNGVKTIANNLTSTVQVFTDSDYQLPYVLGSAHEGCLPPFPADVFMIPQYGYLTLNDGSQAVGRSSFYCLEYFPSQMLRTGNNFQFSYEFENVPFHSSYAHSQSLDRLMNPLIDQYLYYLSKTINGSGQGQQTLKFSVAGPSNMAVQGRNYIPGPSYRQQRVSTTVTFNNNSEFAWPGASSWALNGRNSLMNPGPAMASHKEGEDRFFPLSGSLIFGKQGTGRDNVDADKVMITNEEEIKTTNPVATESYGQVATNHQSARAQAQTGWVQNQGILPGMVWQDRDVYLQGPIWAKIPHTDGNFHPSPLMGGFGMKHPPPQILIKNTPVPADPPTAFNKGKLNSFITQYSTGQVSVEIEWELQKENSKRWNPEIQYTSNYYKSNNVEFAVNTEGVYSEPRPIGTRYLTRNL

SEQ ID NO: 1045 - DNA, 2208 bp, synthetic construct
  misc_feature 1..2208: note = Adeno Associated Virus Capsid Protein Variant
  source 1..2208: mol_type = other DNA
atggctgccgatggttatcttccagattggctcgaggacaaccttagtgaaggaattcgcgagtggtgggctttgaaacctggagcccctcaacccgaagcaaatcaacaacatcaagacaacgctcgaggtcttgtgcttccgggttacaaataccttggacccggcaacggactcgacaagggggagccggtcaacgcagcagacgcggcggccctcgagcacgacaaggcctacgaccagcagctcaaggccggagacaacccgtacctcaagtacaaccacgccgacgccgagttccaggagcggctcaaagaagatacgtcttttgggggcaacctcgggcgagcagtcttccaggccaaaaagaggcttcttgaacctcttggtctggttgaggaagcggctaagacggctcctggaaagaagaggcctgtagagcagtctcctcaggaaccggactcctccgcgggtattggcaaatcgggtgcacagcccgctaaaaagagactcaatttcggtcagactggcgacacagagtcagtcccagaccctcaaccaatcggagaacctcccgcagccccctcaggtgtgggatctcttacaatggcttcaggtggtggcgcaccagtggcagacaataacgaaggtgccgatggagtgggtagttcctcgggaaattggcattgcgattcccaatggctgggggacagagtcatcaccaccagcacccgaacctgggccctgcccacctacaacaatcacctctacaagcaaatctccaacagcacatctggaggatcttcaaatgacaacgcctacttcggctacagcaccccctgggggtattttgacttcaacagattccactgccacttctcaccacgtgactggcagcgactcatcaacaacaactggggattccggcctaagcgactcaacttcaagctcttcaacattcaggtcaaagaggttacggacaacaatggagtcaagaccatcgccaataaccttaccagcacggtccaggtcttcacggactcagactatcagctcccgtacgtgctcgggtcggctcacgagggctgcctcccgccgttcccagcggacgttttcatgattcctcagtacgggtatctgacgcttaatgatggaagccaggccgtgggtcgttcgtccttttactgcctggaatatttcccgtcgcaaatgctaagaacgggtaacaacttccagttcagctacgagtttgagaacgtacctttccatagcagctacgctcacagccaaagcctggaccgactaatgaatccactcatcgaccaatacttgtactatctctcaaagactattaacggttctggacagggccaacaaacgctaaaattcagtgtggccggacccagcaacatggctgtccagggaagaaactacatacctggacccagctaccgacaacaacgtgtctcaaccactgtgacttttaacaacaacagcgaatttgcttggcctggagcttcttcttgggctctcaatggacgtaatagcttgatgaatcctggacctgctatggccagccacaaagaaggagaggaccgtttctttcctttgtctggatctttaatttttggcaaacaaggaactggaagagacaacgtggatgcggacaaagtcatgataaccaacgaagaagaaattaaaactactaacccggtagcaacggagtcctatggacaagtggccacaaaccaccagagtgcccgggcacaggcgcagaccggctgggttcaaaaccaaggaatacttccgggtatggtttggcaggacagagatgtgtacctgcaaggacccatttgggccaaaattcctcacacggacggcaactttcacccttctccgctgatgggagggtttggaatgaagcacccgcctcctcagatcctcatcaaaaacacacctgtacctgcggatcctccaacggccttcaacaagggcaagctgaactctttcatcacccagtattctactggccaagtcagcgtggagatcgagtgggagctgcagaaggaaaacagcaagcgctggaacccggagatccagtacacttccaactattacaagtctaataatgttgaatttgctgttaatactgaaggtgtatatagtgaaccccgccccattggcaccagatacctgactcgtaatctg

SEQ ID NO: 1046 - protein, 736 aa, synthetic construct
  REGION 1..736: note = Adeno Associated Virus Capsid Protein Variant
MAADGYLPDWLEDNLSEGIREWWALKPGAPQPEANQQHQDNARGLVLPGYKYLGPGNGLDKGEPVNAADAAALEHDKAYDQQLKAGDNPYLKYNHADAEFQERLKEDTSFGGNLGRAVFQAKKRLLEPLGLVEEAAKTAPGKKRPVEQSPQEPDSSAGIGKSGAQPAKKRLNFGQTGDTESVPDPQPIGEPPAAPSGVGSLTMASGGGAPVADNNEGADGVGSSSGNWHCDSQWLGDRVITTSTRTWALPTYNNHLYKQISNSTSGGSSNDNAYFGYSTPWGYFDFNRFHCHFSPRDWQRLINNNWGFRPKRLNFKLFNIQVKEVTDNNGVKTIANNLTSTVQVFTDSDYQLPYVLGSAHEGCLPPFPADVFMIPQYGYLTLNDGSQAVGRSSFYCLEYFPSQMLRTGNNFQFSYEFENVPFHSSYAHSQSLDRLMNPLIDQYLYYLSKTINGSGQGQQTLKFSVAGPSNMAVQGRNYIPGPSYRQQRVSTTVTFNNNSEFAWPGASSWALNGRNSLMNPGPAMASHKEGEDRFFPLSGSLIFGKQGTGRDNVDADKVMITNEEEIKTTNPVATESYGQVATNHQSARAQAQTGWVQNQGILPGMVWQDRDVYLQGPIWAKIPHTDGNFHPSPLMGGFGMKHPPPQILIKNTPVPADPPTAFNKGKLNSFITQYSTGQVSVEIEWELQKENSKRWNPEIQYTSNYYKSNNVEFAVNTEGVYSEPRPIGTRYLTRNL

SEQ ID NO: 1047 - DNA, 2208 bp, synthetic construct
  misc_feature 1..2208: note = Adeno Associated Virus Capsid Protein Variant
  source 1..2208: mol_type = other DNA
atggctgccgatggttatcttccagattggctcgaggacaaccttagtgaaggaattcgcgagtggtgggctttgaaacctggagcccctcaacccaaggcaaatcaacaacatcaagacaacgctcgaggtcttgtgcttccgggttacaaatactggggacccggcaacggactcgacaagggggagccggtcaacgcagcagacgcggcggccctcgagcacgacaaggcctacgaccagcagctcaaggccggagacaacccgtacctcaagtacaaccacgccgacgccgagttccaggagcggctcaaagaagatacgtcttttgggggcaacctcgggcgagcagtcttccaggccaaaaagaggcttcttgaacctcttggtctggttgaggaagcggctaagacggctcctggaaagaagaggcctgtagagcagtctcctcaggaaccggactcctccgcgggtattggcaaatcgggtgcacagcccgctaaaaagagactcaatttcggtcagactggcgacacagagtcagtcccagaccctcaaccaatcggagaacctcccgcagccccctcaggtgtgggatctcttacaatggcttcaggtggtggcgcaccagtggcagacaataacgaaggtgccgatggagtgggtagttcctcgggaaattggcattgcgattcccaatggctgggggacagagtcatcaccaccagcacccgaacctgggccctgcccacctacaacaatcacctctacaagcaaatctccaacagcacatctggaggatcttcaaatgacaacgcctacttcggctacagcaccccctgggggtattttgacttcaacagattccactgccacttctcaccacgtgactggcagcgactcatcaacaacaactggggattccggcctaagcgactcaacttcaagctcttcaacattcaggtcaaagaggttacggacaacaatggagtcaagaccatcgccaataaccttaccagcacggtccaggtcttcacggactcagactatcagctcccgtacgtgctcgggtcggctcacgagggctgcctcccgccgttcccagcggacgttttcatgattcctcagtacgggtatctgacgcttaatgatggaagccaggccgtgggtcgttcgtccttttactgcctggaatatttcccgtcgcaaatgctaagaacgggtaacaacttccagttcagctacgagtttgagaacgtacctttccatagcagctacgctcacagccaaagcctggaccgactaatgaatccactcatcgaccaatacttgtactatctctcaaagactattaacggttctggacagggccaacaaacgctaaaattcagtgtggccggacccagcaacatggctgtccagggaagaaactacatacctggacccagctaccgacaacaacgtgtctcaaccactgtgacttttaacaacaacagcgaatttgcttggcctggagcttcttcttgggctctcaatggacgtaatagcttgatgaatcctggacctgctatggccagccacaaagaaggagaggaccgtttctttcctttgtctggatctttaatttttggcaaacaaggaactggaagagacaacgtggatgcggacaaagtcatgataaccaacgaagaagaaattaaaactactaacccggtagcaacggagtcctatggacaagtggccacaaaccaccagagtgcccgggcacaggcgcagaccggctgggttcaaaaccaaggaatacttccgggtatggtttggcaggacagagatgtgtacctgcaaggacccatttgggccaaaattcctcacacggacggcaactttcacccttctccgctgatgggagggtttggaatgaagcacccgcctcctcagatcctcatcaaaaacacacctgtacctgcggatcctccaacggccttcaacaagggcaagctgaactctttcatcacccagtattctactggccaagtcagcgtggagatcgagtgggagctgcagaaggaaaacagcaagcgctggaacccggagatccagtacacttccaactattacaagtctaataatgttgaatttgctgttaatactgaaggtgtatatagtgaaccccgccccattggcaccagatacctgactcgtaatctg

SEQ ID NO: 1048 - protein, 736 aa, synthetic construct
  REGION 1..736: note = Adeno Associated Virus Capsid Protein Variant
MAADGYLPDWLEDNLSEGIREWWALKPGAPQPKANQQHQDNARGLVLPGYKYWGPGNGLDKGEPVNAADAAALEHDKAYDQQLKAGDNPYLKYNHADAEFQERLKEDTSFGGNLGRAVFQAKKRLLEPLGLVEEAAKTAPGKKRPVEQSPQEPDSSAGIGKSGAQPAKKRLNFGQTGDTESVPDPQPIGEPPAAPSGVGSLTMASGGGAPVADNNEGADGVGSSSGNWHCDSQWLGDRVITTSTRTWALPTYNNHLYKQISNSTSGGSSNDNAYFGYSTPWGYFDFNRFHCHFSPRDWQRLINNNWGFRPKRLNFKLFNIQVKEVTDNNGVKTIANNLTSTVQVFTDSDYQLPYVLGSAHEGCLPPFPADVFMIPQYGYLTLNDGSQAVGRSSFYCLEYFPSQMLRTGNNFQFSYEFENVPFHSSYAHSQSLDRLMNPLIDQYLYYLSKTINGSGQGQQTLKFSVAGPSNMAVQGRNYIPGPSYRQQRVSTTVTFNNNSEFAWPGASSWALNGRNSLMNPGPAMASHKEGEDRFFPLSGSLIFGKQGTGRDNVDADKVMITNEEEIKTTNPVATESYGQVATNHQSARAQAQTGWVQNQGILPGMVWQDRDVYLQGPIWAKIPHTDGNFHPSPLMGGFGMKHPPPQILIKNTPVPADPPTAFNKGKLNSFITQYSTGQVSVEIEWELQKENSKRWNPEIQYTSNYYKSNNVEFAVNTEGVYSEPRPIGTRYLTRNL

SEQ ID NO: 1049 - DNA, 2208 bp, synthetic construct
  misc_feature 1..2208: note = Adeno Associated Virus Capsid Protein Variant
  source 1..2208: mol_type = other DNA
atggctgccgatggttatcttccagattggctcgaggacaaccttagtgaaggaattcgcgagtggtgggctttgaaacctggagcccctcaacccaaggcaaatcaacaacatcaagacaacgctcgaggtcttgtgcttccgggttacaaataccttggacccggcaacggactcgacaagggggagccggtcaacgcagcagacgcggcggccctcgagcacgacaaggcctacgaccagcagctcaaggccggagacaacccgtacctcaagtacaaccacgccgacgccgagttccaggagcggctcaaagaagatacgtcttttgggggcaacctcgggcgagcagtcttccaggccaaaaagaggcttcttgaacctcttggtctggttgaggaagcggctaagacggctcctggaaagaagaggcctgtagagcagtctcctcaggaaccggactcctccgcgggtattggcaaatcgggtgcacagcccgctaaaaagagactcaatttcggtcagactggcgacacagagtcagtcccagaccctcaaccaatcggagaacctcccgcagccccctcaggtgtgggatctcttacaatggcttcaggtggtggcgcaccagtggcagacaataacgaaggtgccgatggagtgggtagttcctcgggaaattggcattgcgattcccaatggctgggggacagagtcatcaccaccagcacccgaacctgggccctgcccacctacaacaatcacctctacaagcaaatctccaacagcacatctctgggatcttcaaatgacaacgcctacttcggctacagcaccccctgggggtattttgacttcaacagattccactgccacttctcaccacgtgactggcagcgactcatcaacaacaactggggattccggcctaagcgactcaacttcaagctcttcaacattcaggtcaaagaggttacggacaacaatggagtcaagaccatcgccaataaccttaccagcacggtccaggtcttcacggactcagactatcagctcccgtacgtgctcgggtcggctcacgagggctgcctcccgccgttcccagcggacgttttcatgattcctcagtacgggtatctgacgcttaatgatggaagccaggccgtgggtcgttcgtccttttactgcctggaatatttcccgtcgcaaatgctaagaacgggtaacaacttccagttcagctacgagtttgagaacgtacctttccatagcagctacgctcacagccaaagcctggaccgactaatgaatccactcatcgaccaatacttgtactatctctcaaagactattaacggttctggacagggccaacaaacgctaaaattcagtgtggccggacccagcaacatggctgtccagggaagaaactacatacctggacccagctaccgacaacaacgtgtctcaaccactgtgacttttaacaacaacagcgaatttgcttggcctggagcttcttcttgggctctcaatggacgtaatagcttgatgaatcctggacctgctatggccagccacaaagaaggagaggaccgtttctttcctttgtctggatctttaatttttggcaaacaaggaactggaagagacaacgtggatgcggacaaagtcatgataaccaacgaagaagaaattaaaactactaacccggtagcaacggagtcctatggacaagtggccacaaaccaccagagtgcccgggcacaggcgcagaccggctgggttcaaaaccaaggaatacttccgggtatggtttggcaggacagagatgtgtacctgcaaggacccatttgggccaaaattcctcacacggacggcaactttcacccttctccgctgatgggagggtttggaatgaagcacccgcctcctcagatcctcatcaaaaacacacctgtacctgcggatcctccaacggccttcaacaagggcaagctgaactctttcatcacccagtattctactggccaagtcagcgtggagatcgagtgggagctgcagaaggaaaacagcaagcgctggaacccggagatccagtacacttccaactattacaagtctaataatgttgaatttgctgttaatactgaaggtgtatatagtgaaccccgccccattggcaccagatacctgactcgtaatctg

SEQ ID NO: 1050 - protein, 736 aa, synthetic construct
  REGION 1..736: note = Adeno Associated Virus Capsid Protein Variant
MAADGYLPDWLEDNLSEGIREWWALKPGAPQPKANQQHQDNARGLVLPGYKYLGPGNGLDKGEPVNAADAAALEHDKAYDQQLKAGDNPYLKYNHADAEFQERLKEDTSFGGNLGRAVFQAKKRLLEPLGLVEEAAKTAPGKKRPVEQSPQEPDSSAGIGKSGAQPAKKRLNFGQTGDTESVPDPQPIGEPPAAPSGVGSLTMASGGGAPVADNNEGADGVGSSSGNWHCDSQWLGDRVITTSTRTWALPTYNNHLYKQISNSTSLGSSNDNAYFGYSTPWGYFDFNRFHCHFSPRDWQRLINNNWGFRPKRLNFKLFNIQVKEVTDNNGVKTIANNLTSTVQVFTDSDYQLPYVLGSAHEGCLPPFPADVFMIPQYGYLTLNDGSQAVGRSSFYCLEYFPSQMLRTGNNFQFSYEFENVPFHSSYAHSQSLDRLMNPLIDQYLYYLSKTINGSGQGQQTLKFSVAGPSNMAVQGRNYIPGPSYRQQRVSTTVTFNNNSEFAWPGASSWALNGRNSLMNPGPAMASHKEGEDRFFPLSGSLIFGKQGTGRDNVDADKVMITNEEEIKTTNPVATESYGQVATNHQSARAQAQTGWVQNQGILPGMVWQDRDVYLQGPIWAKIPHTDGNFHPSPLMGGFGMKHPPPQILIKNTPVPADPPTAFNKGKLNSFITQYSTGQVSVEIEWELQKENSKRWNPEIQYTSNYYKSNNVEFAVNTEGVYSEPRPIGTRYLTRNL

SEQ ID NO: 1051 - DNA, 2208 bp, synthetic construct
  misc_feature 1..2208: note = Adeno Associated Virus Capsid Protein Variant
  source 1..2208: mol_type = other DNA
atggctgccgatggttatcttccagattggctcgaggacaaccttagtgaaggaattcgcgagtggtgggctttgaaacctggagcccctcaacccaaggcaaatcaacaacatcaagacaacgctcgaggtcttgtgcttccgggttacaaataccttggacccggcaacggactcgacaagggggagccggtcaacgcagcagacgcggcggccctcgagcacgacaaggcctacgaccagcagctcaaggccggagacaacccgtacctcaagtacaaccacgccgacgccgagttccaggagcggctcaaagaagatacgtcttttgggggcaacctcgggcgagcagtcttccaggccaaaaagaggcttcttgaacctcttggtctggttgaggaagcggctaagacggctcctggaaagaagaggcctgtagagcagtctcctcaggaaccggactcctccgcgggtattggcaaatcgggtgcacagcccgctaaaaagagactcaatttcggtcagactggcgacacagagtcagtcccagaccctcaaccaatcggagaacctcccgcagccccctcaggtgtgggatctcttacaatggcttcaggtggtggcgcaccagtggcagacaataacgaaggtgccgatggagtgggtagttcctcgggaaattggcattgcgattcccaatggctgggggacagagtcatcaccaccagcacccgaacctgggccctgcccacctacaacaatcacctctacaagcaaatctccaacagcggttctggaggatcttcaaatgacaacgcctacttcggctacagcaccccctgggggtattttgacttcaacagattccactgccacttctcaccacgtgactggcagcgactcatcaacaacaactggggattccggcctaagcgactcaacttcaagctcttcaacattcaggtcaaagaggttacggacaacaatggagtcaagaccatcgccaataaccttaccagcacggtccaggtcttcacggactcagactatcagctcccgtacgtgctcgggtcggctcacgagggctgcctcccgccgttcccagcggacgttttcatgattcctcagtacgggtatctgacgcttaatgatggaagccaggccgtgggtcgttcgtccttttactgcctggaatatttcccgtcgcaaatgctaagaacgggtaacaacttccagttcagctacgagtttgagaacgtacctttccatagcagctacgctcacagccaaagcctggaccgactaatgaatccactcatcgaccaatacttgtactatctctcaaagactattaacggttctggacagggccaacaaacgctaaaattcagtgtggccggacccagcaacatggctgtccagggaagaaactacatacctggacccagctaccgacaacaacgtgtctcaaccactgtgacttttaacaacaacagcgaatttgcttggcctggagcttcttcttgggctctcaatggacgtaatagcttgatgaatcctggacctgctatggccagccacaaagaaggagaggaccgtttctttcctttgtctggatctttaatttttggcaaacaaggaactggaagagacaacgtggatgcggacaaagtcatgataaccaacgaagaagaaattaaaactactaacccggtagcaacggagtcctatggacaagtggccacaaaccaccagagtgcccgggcacaggcgcagaccggctgggttcaaaaccaaggaatacttccgggtatggtttggcaggacagagatgtgtacctgcaaggacccatttgggccaaaattcctcacacggacggcaactttcacccttctccgctgatgggagggtttggaatgaagcacccgcctcctcagatcctcatcaaaaacacacctgtacctgcggatcctccaacggccttcaacaagggcaagctgaactctttcatcacccagtattctactggccaagtcagcgtggagatcgagtgggagctgcagaaggaaaacagcaagcgctggaacccggagatccagtacacttccaactattacaagtctaataatgttgaatttgctgttaatactgaaggtgtatatagtgaaccccgccccattggcaccagatacctgactcgtaatctg

SEQ ID NO: 1052 - protein, 736 aa, synthetic construct
  REGION 1..736: note = Adeno Associated Virus Capsid Protein Variant
MAADGYLPDWLEDNLSEGIREWWALKPGAPQPKANQQHQDNARGLVLPGYKYLGPGNGLDKGEPVNAADAAALEHDKAYDQQLKAGDNPYLKYNHADAEFQERLKEDTSFGGNLGRAVFQAKKRLLEPLGLVEEAAKTAPGKKRPVEQSPQEPDSSAGIGKSGAQPAKKRLNFGQTGDTESVPDPQPIGEPPAAPSGVGSLTMASGGGAPVADNNEGADGVGSSSGNWHCDSQWLGDRVITTSTRTWALPTYNNHLYKQISNSGSGGSSNDNAYFGYSTPWGYFDFNRFHCHFSPRDWQRLINNNWGFRPKRLNFKLFNIQVKEVTDNNGVKTIANNLTSTVQVFTDSDYQLPYVLGSAHEGCLPPFPADVFMIPQYGYLTLNDGSQAVGRSSFYCLEYFPSQMLRTGNNFQFSYEFENVPFHSSYAHSQSLDRLMNPLIDQYLYYLSKTINGSGQGQQTLKFSVAGPSNMAVQGRNYIPGPSYRQQRVSTTVTFNNNSEFAWPGASSWALNGRNSLMNPGPAMASHKEGEDRFFPLSGSLIFGKQGTGRDNVDADKVMITNEEEIKTTNPVATESYGQVATNHQSARAQAQTGWVQNQGILPGMVWQDRDVYLQGPIWAKIPHTDGNFHPSPLMGGFGMKHPPPQILIKNTPVPADPPTAFNKGKLNSFITQYSTGQVSVEIEWELQKENSKRWNPEIQYTSNYYKSNNVEFAVNTEGVYSEPRPIGTRYLTRNL

SEQ ID NO: 1053 - DNA, 2208 bp, synthetic construct
  misc_feature 1..2208: note = Adeno Associated Virus Capsid Protein Variant
  source 1..2208: mol_type = other DNA
atggctgccgatggttatcttccagattggctcgaggacaaccttagtgaaggaattcgcgagtggtgggctttgaaacctggagcccctcaacccaaggcaaatcaacaacatcaagacaacgctcgaggtcttgtgcttccgggttacaaataccttggacccggcaacggactcgacaagggggagccggtcaacgcagcagacgcggcggccctcgagcacgacaaggcctacgaccagcagctcaaggccggagacaacccgtacctcaagtacaaccacgccgacgccgagttccaggagcggctcaaagaagatacgtcttttgggggcaacctcgggcgagcagtcttccaggccaaaaagaggcttcttgaacctcttggtctggttgaggaagcggctaagacggctcctggaaagaagaggcctgtagagcagtctcctcaggaaccggactcctccgcgggtattggcaaatcgggtgcacagcccgctaaaaagagactcaatttcggtcagactggcgacacagagtcagtcccagaccctcaaccaatcggagaacctcccgcagccccctcaggtgtgggatctcttacaatggcttcaggtggtggcgcaccagtggcagacaataacgaaggtgccgatggagtgggtagttcctcgggaaattggcattgcgattcccaatggctgggggacagagtcatcaccaccagcacccgaacctgggccctgcccacctacaacaatcacctctacaagcaaatctccaacagcacatctggaggatcttcaaatgacaacgcctacttcggctacagcaccccctgggggtattttgacttcaacagattccactgccacttctcaccacgtgactggcagcgactcatcaacaacaactggggattccggcctaagcgactcaacttcaagctcttcaacattcaggtcaaagaggttacggacaacaatggagtcaagaccatcgccaataaccttaccagcacggtccaggtcttcacggactcagactatcagctcccgtacgtgctcgggtcggctcacgagggctgcctcccgccgttcccagcggacgttttcatgattcctcagtacgggtatctgacgcttaatgatggaagccaggccgtgggtcgttcgtccttttactgcctggaatatttcccgtcgcaaatgctaagaacgggtaacaacttccagttcagctacgagtttgagaacgtacctttccatagcagctacgctcacagccaaagcctggaccgactaatgaatccactcatcgaccaatacttgtactatctctcaaagactacgaacggttctggacagggccaacaaacgctaaaattcagtgtggccggacccagcaacatggctgtccagggaagaaactacatacctggacccagctaccgacaacaacgtgtctcaaccactgtgacttttaacaacaacagcgaatttgcttggcctggagcttcttcttgggctctcaatggacgtaatagcttgatgaatcctggacctgctatggccagccacaaagaaggagaggaccgtttctttcctttgtctggatctttaatttttggcaaacaaggaactggaagagacaacgtggatgcggacaaagtcatgataaccaacgaagaagaaattaaaactactaacccggtagcaacggagtcctatggacaagtggccacaaaccaccagagtgcccgggcacaggcgcagaccggctgggttcaaaaccaaggaatacttccgggtatggtttggcaggacagagatgtgtacctgcaaggacccatttgggccaaaattcctcacacggacggcaactttcacccttctccgctgatgggagggtttggaatgaagcacccgcctcctcagatcctcatcaaaaacacacctgtacctgcggatcctccaacggccttcaacaagggcaagctgaactctttcatcacccagtattctactggccaagtcagcgtggagatcgagtgggagctgcagaaggaaaacagcaagcgctggaacccggagatccagtacacttccaactattacaagtctaataatgttgaatttgctgttaatactgaaggtgtatatagtgaaccccgccccattggcaccagatacctgactcgtaatctg

SEQ ID NO: 1054 - protein, 736 aa, synthetic construct
  REGION 1..736: note = Adeno Associated Virus Capsid Protein Variant
MAADGYLPDWLEDNLSEGIREWWALKPGAPQPKANQQHQDNARGLVLPGYKYLGPGNGLDKGEPVNAADAAALEHDKAYDQQLKAGDNPYLKYNHADAEFQERLKEDTSFGGNLGRAVFQAKKRLLEPLGLVEEAAKTAPGKKRPVEQSPQEPDSSAGIGKSGAQPAKKRLNFGQTGDTESVPDPQPIGEPPAAPSGVGSLTMASGGGAPVADNNEGADGVGSSSGNWHCDSQWLGDRVITTSTRTWALPTYNNHLYKQISNSTSGGSSNDNAYFGYSTPWGYFDFNRFHCHFSPRDWQRLINNNWGFRPKRLNFKLFNIQVKEVTDNNGVKTIANNLTSTVQVFTDSDYQLPYVLGSAHEGCLPPFPADVFMIPQYGYLTLNDGSQAVGRSSFYCLEYFPSQMLRTGNNFQFSYEFENVPFHSSYAHSQSLDRLMNPLIDQYLYYLSKTTNGSGQGQQTLKFSVAGPSNMAVQGRNYIPGPSYRQQRVSTTVTFNNNSEFAWPGASSWALNGRNSLMNPGPAMASHKEGEDRFFPLSGSLIFGKQGTGRDNVDADKVMITNEEEIKTTNPVATESYGQVATNHQSARAQAQTGWVQNQGILPGMVWQDRDVYLQGPIWAKIPHTDGNFHPSPLMGGFGMKHPPPQILIKNTPVPADPPTAFNKGKLNSFITQYSTGQVSVEIEWELQKENSKRWNPEIQYTSNYYKSNNVEFAVNTEGVYSEPRPIGTRYLTRNL

SEQ ID NO: 1055 - DNA, 2208 bp, synthetic construct
  misc_feature 1..2208: note = Adeno Associated Virus Capsid Protein Variant
  source 1..2208: mol_type = other DNA
atggctgccgatggttatcttccagattggctcgaggacaaccttagtgaaggaattcgcgagtggtgggctttgaaacctggagcccctcaacccaaggcaaatcaacaacatcaagacaacgctcgaggtcttgtgcttccgggttacaaataccttggacccggcaacggactcgacaagggggagccggtcaacgcagcagacgcggcggccctcgagcacgacaaggcctacgaccagcagctcaaggccggagacaacccgtacctcaagtacaaccacgccgacgccgagttccaggagcggctcaaagaagatacgtcttttgggggcaacctcgggcgagcagtcttccaggccaaaaagaggcttcttgaacctcttggtctggttgaggaagcggctaagacggctcctggaaagaagaggcctgtagagcagtctcctcaggaaccggactcctccgcgggtattggcaaatcgggtgcacagcccgctaaaaagagactcaatttcggtcagactggcgacacagagtcagtcccagaccctcaaccaatcggagaacctcccgcagccccctcaggtgtgggatctcttacaatggcttcaggtggtggcgcaccagtggcagacaataacgaaggtgccgatggagtgggtagttcctcgggaaattggcattgcgattcccaatggctgggggacagagtcatcaccaccagcacccgaacctgggccctgcccacctacaacaatcacctctacaagcaaatctccaacagcacatctggaggatcttcaaatgacaacgcctacttcggctacagcaccccctgggggtattttgacttcaacagattccactgccacttctcaccacgtgactggcagcgactcatcaacaacaactggggattccggcctaagcgactcaacttcaagctcttcaacattcaggtcaaagaggttacggacaacaatggagtcaagaccatcgccaataaccttaccagcacggtccaggtcttcacggactcagactatcagctcccgtacgtgctcgggtcggctcacgagggctgcctcccgccgttcccagcggacgttttcatgattcctcagtacgggtatctgacgcttaatgatggaagccaggccgtgggtcgttcgtccttttactgcctggaatatttcccgtcgcaaatgctaagaacgggtaacaacttccagttcagctacgagtttgagaacgtacctttccatagcagctacgctcacagccaaagcctggaccgactaatgaatccactcatcgaccaatacttgtactatctctcaaagactattaacggttctggacagggccaacaaacgctaaaattcagtgtggccggacccagcaacatggctgtccagggaagaaactacatacctggacccagctaccgacaacaacgtgtctcaaccactgtgacttttaacaacaacagcgaatttgcttggcctggagcttcttcttgggagctcaatggacgtaatagcttgatgaatcctggacctgctatggccagccacaaagaaggagaggaccgtttctttcctttgtctggatctttaatttttggcaaacaaggaactggaagagacaacgtggatgcggacaaagtcatgataaccaacgaagaagaaattaaaactactaacccggtagcaacggagtcctatggacaagtggccacaaaccaccagagtgcccgggcacaggcgcagaccggctgggttcaaaaccaaggaatacttccgggtatggtttggcaggacagagatgtgtacctgcaaggacccatttgggccaaaattcctcacacggacggcaactttcacccttctccgctgatgggagggtttggaatgaagcacccgcctcctcagatcctcatcaaaaacacacctgtacctgcggatcctccaacggccttcaacaagggcaagctgaactctttcatcacccagtattctactggccaagtcagcgtggagatcgagtgggagctgcagaaggaaaacagcaagcgctggaacccggagatccagtacacttccaactattacaagtctaataatgttgaatttgctgttaatactgaaggtgtatatagtgaaccccgccccattggcaccagatacctgactcgtaatctg

SEQ ID NO: 1056 - protein, 736 aa, synthetic construct
  REGION 1..736: note = Adeno Associated Virus Capsid Protein Variant
MAADGYLPDWLEDNLSEGIREWWALKPGAPQPKANQQHQDNARGLVLPGYKYLGPGNGLDKGEPVNAADAAALEHDKAYDQQLKAGDNPYLKYNHADAEFQERLKEDTSFGGNLGRAVFQAKKRLLEPLGLVEEAAKTAPGKKRPVEQSPQEPDSSAGIGKSGAQPAKKRLNFGQTGDTESVPDPQPIGEPPAAPSGVGSLTMASGGGAPVADNNEGADGVGSSSGNWHCDSQWLGDRVITTSTRTWALPTYNNHLYKQISNSTSGGSSNDNAYFGYSTPWGYFDFNRFHCHFSPRDWQRLINNNWGFRPKRLNFKLFNIQVKEVTDNNGVKTIANNLTSTVQVFTDSDYQLPYVLGSAHEGCLPPFPADVFMIPQYGYLTLNDGSQAVGRSSFYCLEYFPSQMLRTGNNFQFSYEFENVPFHSSYAHSQSLDRLMNPLIDQYLYYLSKTINGSGQGQQTLKFSVAGPSNMAVQGRNYIPGPSYRQQRVSTTVTFNNNSEFAWPGASSWELNGRNSLMNPGPAMASHKEGEDRFFPLSGSLIFGKQGTGRDNVDADKVMITNEEEIKTTNPVATESYGQVATNHQSARAQAQTGWVQNQGILPGMVWQDRDVYLQGPIWAKIPHTDGNFHPSPLMGGFGMKHPPPQILIKNTPVPADPPTAFNKGKLNSFITQYSTGQVSVEIEWELQKENSKRWNPEIQYTSNYYKSNNVEFAVNTEGVYSEPRPIGTRYLTRNL

SEQ ID NO: 1057 - DNA, 2208 bp, synthetic construct
  misc_feature 1..2208: note = Adeno Associated Virus Capsid Protein Variant
  source 1..2208: mol_type = other DNA
atggctgccgatggttatcttccagattggctcgaggacaaccttagtgaaggaattcgcgagtggtgggctttgaaacctggagcccctcaacccaaggcaaatcaacaacatcaagacaacgctcgaggtcttgtgcttccgggttacaaatactgtggacccggcaacggactcgacaagggggagccggtcaacgcagcagacgcggcggccctcgagcacgacaaggcctacgaccagcagctcaaggccggagacaacccgtacctcaagtacaaccacgccgacgccgagttccaggagcggctcaaagaagatacgtcttttgggggcaacctcgggcgagcagtcttccaggccaaaaagaggcttcttgaacctcttggtctggttgaggaagcggctaagacggctcctggaaagaagaggcctgtagagcagtctcctcaggaaccggactcctccgcgggtattggcaaatcgggtgcacagcccgctaaaaagagactcaatttcggtcagactggcgacacagagtcagtcccagaccctcaaccaatcggagaacctcccgcagccccctcaggtgtgggatctcttacaatggcttcaggtggtggcgcaccagtggcagacaataacgaaggtgccgatggagtgggtagttcctcgggaaattggcattgcgattcccaatggctgggggacagagtcatcaccaccagcacccgaacctgggccctgcccacctacaacaatcacctctacaagcaaatctccaacagcacatctggaggatcttcaaatgacaacgcctacttcggctacagcaccccctgggggtattttgacttcaacagattccactgccacttctcaccacgtgactggcagcgactcatcaacaacaactggggattccggcctaagcgactcaacttcaagctcttcaacattcaggtcaaagaggttacggacaacaatggagtcaagaccatcgccaataaccttaccagcacggtccaggtcttcacggactcagactatcagctcccgtacgtgctcgggtcggctcacgagggctgcctcccgccgttcccagcggacgttttcatgattcctcagtacgggtatctgacgcttaatgatggaagccaggccgtgggtcgttcgtccttttactgcctggaatatttcccgtcgcaaatgctaagaacgggtaacaacttccagttcagctacgagtttgagaacgtacctttccatagcagctacgctcacagccaaagcctggaccgactaatgaatccactcatcgaccaatacttgtactatctctcaaagactattaacggttctggacagggccaacaaacgctaaaattcagtgtggccggacccagcaacatggctgtccagggaagaaactacatacctggacccagctaccgacaacaacgtgtctcaaccactgtgacttttaacaacaacagcgaatttgcttggcctggagcttcttcttgggctctcaatggacgtaatagcttgatgaatcctggacctgctatggccagccacaaagaaggagaggaccgtttctttcctttgtctggatctttaatttttggcaaacaaggaactggaagagacaacgtggatgcggacaaagtcatgataaccaacgaagaagaaattaaaactactaacccggtagcaacggagtcctatggacaagtggccacaaaccaccagagtgcccgggcacaggcgcagaccggctgggttcaaaaccaaggaatacttccgggtatggtttggcaggacagagatgtgtacctgcaaggacccatttgggccaaaattcctcacacggacggcaactttcacccttctccgctgatgggagggtttggaatgaagcacccgcctcctcagatcctcatcaaaaacacacctgtacctgcggatcctccaacggccttcaacaagggcaagctgaactctttcatcacccagtattctactggccaagtcagcgtggagatcgagtgggagctgcagaaggaaaacagcaagcgctggaacccggagatccagtacacttccaactattacaagtctaataatgttgaatttgctgttaatactgaaggtgtatatagtgaaccccgccccattggcaccagatacctgactcgtaatctg

SEQ ID NO: 1058 - protein, 736 aa, synthetic construct
  REGION 1..736: note = Adeno Associated Virus Capsid Protein Variant
MAADGYLPDWLEDNLSEGIREWWALKPGAPQPKANQQHQDNARGLVLPGYKYCGPGNGLDKGEPVNAADAAALEHDKAYDQQLKAGDNPYLKYNHADAEFQERLKEDTSFGGNLGRAVFQAKKRLLEPLGLVEEAAKTAPGKKRPVEQSPQEPDSSAGIGKSGAQPAKKRLNFGQTGDTESVPDPQPIGEPPAAPSGVGSLTMASGGGAPVADNNEGADGVGSSSGNWHCDSQWLGDRVITTSTRTWALPTYNNHLYKQISNSTSGGSSNDNAYFGYSTPWGYFDFNRFHCHFSPRDWQRLINNNWGFRPKRLNFKLFNIQVKEVTDNNGVKTIANNLTSTVQVFTDSDYQLPYVLGSAHEGCLPPFPADVFMIPQYGYLTLNDGSQAVGRSSFYCLEYFPSQMLRTGNNFQFSYEFENVPFHSSYAHSQSLDRLMNPLIDQYLYYLSKTINGSGQGQQTLKFSVAGPSNMAVQGRNYIPGPSYRQQRVSTTVTFNNNSEFAWPGASSWALNGRNSLMNPGPAMASHKEGEDRFFPLSGSLIFGKQGTGRDNVDADKVMITNEEEIKTTNPVATESYGQVATNHQSARAQAQTGWVQNQGILPGMVWQDRDVYLQGPIWAKIPHTDGNFHPSPLMGGFGMKHPPPQILIKNTPVPADPPTAFNKGKLNSFITQYSTGQVSVEIEWELQKENSKRWNPEIQYTSNYYKSNNVEFAVNTEGVYSEPRPIGTRYLTRNL

SEQ ID NO: 1059 - DNA, 2208 bp, synthetic construct
  misc_feature 1..2208: note = Adeno Associated Virus Capsid Protein Variant
  source 1..2208: mol_type = other DNA
atggctgccgatggttatcttccagattggctcgaggacaaccttagtgaaggaattcgcgagtggtgggctttgaaacctggagcccctcaacccaaggcaaatcaacaacatcaagacaacgctcgaggtcttgtgcttccgggttacaaatacccaggacccggcaacggactcgacaagggggagccggtcaacgcagcagacgcggcggccctcgagcacgacaaggcctacgaccagcagctcaaggccggagacaacccgtacctcaagtacaaccacgccgacgccgagttccaggagcggctcaaagaagatacgtcttttgggggcaacctcgggcgagcagtcttccaggccaaaaagaggcttcttgaacctcttggtctggttgaggaagcggctaagacggctcctggaaagaagaggcctgtagagcagtctcctcaggaaccggactcctccgcgggtattggcaaatcgggtgcacagcccgctaaaaagagactcaatttcggtcagactggcgacacagagtcagtcccagaccctcaaccaatcggagaacctcccgcagccccctcaggtgtgggatctcttacaatggcttcaggtggtggcgcaccagtggcagacaataacgaaggtgccgatggagtgggtagttcctcgggaaattggcattgcgattcccaatggctgggggacagagtcatcaccaccagcacccgaacctgggccctgcccacctacaacaatcacctctacaagcaaatctccaacagcacatctggaggatcttcaaatgacaacgcctacttcggctacagcaccccctgggggtattttgacttcaacagattccactgccacttctcaccacgtgactggcagcgactcatcaacaacaactggggattccggcctaagcgactcaacttcaagctcttcaacattcaggtcaaagaggttacggacaacaatggagtcaagaccatcgccaataaccttaccagcacggtccaggtcttcacggactcagactatcagctcccgtacgtgctcgggtcggctcacgagggctgcctcccgccgttcccagcggacgttttcatgattcctcagtacgggtatctgacgcttaatgatggaagccaggccgtgggtcgttcgtccttttactgcctggaatatttcccgtcgcaaatgctaagaacgggtaacaacttccagttcagctacgagtttgagaacgtacctttccatagcagctacgctcacagccaaagcctggaccgactaatgaatccactcatcgaccaatacttgtactatctctcaaagactattaacggttctggacagggccaacaaacgctaaaattcagtgtggccggacccagcaacatggctgtccagggaagaaactacatacctggacccagctaccgacaacaacgtgtctcaaccactgtgacttttaacaacaacagcgaatttgcttggcctggagcttcttcttgggctctcaatggacgtaatagcttgatgaatcctggacctgctatggccagccacaaagaaggagaggaccgtttctttcctttgtctggatctttaatttttggcaaacaaggaactggaagagacaacgtggatgcggacaaagtcatgataaccaacgaagaagaaattaaaactactaacccggtagcaacggagtcctatggacaagtggccacaaaccaccagagtgcccgggcacaggcgcagaccggctgggttcaaaaccaaggaatacttccgggtatggtttggcaggacagagatgtgtacctgcaaggacccatttgggccaaaattcctcacacggacggcaactttcacccttctccgctgatgggagggtttggaatgaagcacccgcctcctcagatcctcatcaaaaacacacctgtacctgcggatcctccaacggccttcaacaagggcaagctgaactctttcatcacccagtattctactggccaagtcagcgtggagatcgagtgggagctgcagaaggaaaacagcaagcgctggaacccggagatccagtacacttccaactattacaagtctaataatgttgaatttgctgttaatactgaaggtgtatatagtgaaccccgccccattggcaccagatacctgactcgtaatctg

SEQ ID NO: 1060 - protein, 736 aa, synthetic construct
  REGION 1..736: note = Adeno Associated Virus Capsid Protein Variant
MAADGYLPDWLEDNLSEGIREWWALKPGAPQPKANQQHQDNARGLVLPGYKYPGPGNGLDKGEPVNAADAAALEHDKAYDQQLKAGDNPYLKYNHADAEFQERLKEDTSFGGNLGRAVFQAKKRLLEPLGLVEEAAKTAPGKKRPVEQSPQEPDSSAGIGKSGAQPAKKRLNFGQTGDTESVPDPQPIGEPPAAPSGVGSLTMASGGGAPVADNNEGADGVGSSSGNWHCDSQWLGDRVITTSTRTWALPTYNNHLYKQISNSTSGGSSNDNAYFGYSTPWGYFDFNRFHCHFSPRDWQRLINNNWGFRPKRLNFKLFNIQVKEVTDNNGVKTIANNLTSTVQVFTDSDYQLPYVLGSAHEGCLPPFPADVFMIPQYGYLTLNDGSQAVGRSSFYCLEYFPSQMLRTGNNFQFSYEFENVPFHSSYAHSQSLDRLMNPLIDQYLYYLSKTINGSGQGQQTLKFSVAGPSNMAVQGRNYIPGPSYRQQRVSTTVTFNNNSEFAWPGASSWALNGRNSLMNPGPAMASHKEGEDRFFPLSGSLIFGKQGTGRDNVDADKVMITNEEEIKTTNPVATESYGQVATNHQSARAQAQTGWVQNQGILPGMVWQDRDVYLQGPIWAKIPHTDGNFHPSPLMGGFGMKHPPPQILIKNTPVPADPPTAFNKGKLNSFITQYSTGQVSVEIEWELQKENSKRWNPEIQYTSNYYKSNNVEFAVNTEGVYSEPRPIGTRYLTRNL

SEQ ID NO: 1061 - DNA, 2208 bp, synthetic construct
  misc_feature 1..2208: note = Adeno Associated Virus Capsid Protein Variant
  source 1..2208: mol_type = other DNA
atggctgccgatggttatcttccagattggctcgaggacaaccttagtgaaggaattcgcgagtggtgggctttgaaacctggagcccctcaacccaaggcaaatcaacaacatcaagacaacgctcgaggtcttgtgcttccgggttacaaataccttggacccggcaacggactcgacaagggggagccggtcaacgcagcagacgcggcggccctcgagcacgacaaggcctacgaccagcagctcaaggccggagacaacccgtacctcaagtacaaccacgccgacgccgagttccaggagcggctcaaagaagatacgtcttttgggggcaacctcgggcgagcagtcttccaggccaaaaagaggcttcttgaacctcttggtctggttgaggaagcggctaagacggctcctggaaagaagaggcctgtagagcagtctcctcaggaaccggactcctccgcgggtattggcaaatcgggtgcacagcccgctaaaaagagactcaatttcggtcagactggcgacacagagtcagtcccagaccctcaaccaatcggagaacctcccgcagccccctcaggtgtgggatctcttacaatggcttcaggtggtggcgcaccagtggcagacaataacgaaggtgccgatggagtgggtagttcctcgggaaattggcattgcgattcccaatggctgggggacagagtcatcaccaccagcacccgaacctgggccctgcccacctacaacaatcacctctacaagcaaatctccaacagcacatctggaggatcttcaaatgacaacgcctacttcggctacagcaccccctgggggtattttgacttcaacagattccactgccacttctcaccacgtgactggcagcgactcatcaacaacaactggggattccggcctaagcgactcaacttcaagctcttcaacattcaggtcaaagaggttacggacaacaatggagtcaagaccatcgccaataaccttaccagcacggtccaggtcttcacggactcagactatcagctcccgtacgtgctcgggtcggctcacgagggctgcctcccgccgttcccagcggacgttttcatgattcctcagtacgggtatctgacgcttaatgatggaagccaggccgtgggtcgttcgtccttttactgcctggaatatttcccgtcgcaaatgctaagaacgggtaacaacttccagttcagctacgagtttgagaacgtacctttccatagcagctacgctcacagccaaagcctggaccgactaatgaatccactcatcgaccaatacttgtactatctctcaaagactattaacggttctggacagggccaacaaacgctaaaattcagtgtggccggatatagcaacatggctgtccagggaagaaactacatacctggacccagctaccgacaacaacgtgtctcaaccactgtgacttttaacaacaacagcgaatttgcttggcctggagcttcttcttgggctctcaatggacgtaatagcttgatgaatcctggacctgctatggccagccacaaagaaggagaggaccgtttctttcctttgtctggatctttaatttttggcaaacaaggaactggaagagacaacgtggatgcggacaaagtcatgataaccaacgaagaagaaattaaaactactaacccggtagcaacggagtcctatggacaagtggccacaaaccaccagagtgcccgggcacaggcgcagaccggctgggttcaaaaccaaggaatacttccgggtatggtttggcaggacagagatgtgtacctgcaaggacccatttgggccaaaattcctcacacggacggcaactttcacccttctccgctgatgggagggtttggaatgaagcacccgcctcctcagatcctcatcaaaaacacacctgtacctgcggatcctccaacggccttcaacaagggcaagctgaactctttcatcacccagtattctactggccaagtcagcgtggagatcgagtgggagctgcagaaggaaaacagcaagcgctggaacccggagatccagtacacttccaactattacaagtctaataatgttgaatttgctgttaatactgaaggtgtatatagtgaaccccgccccattggcaccagatacctgactcgtaatctg

SEQ ID NO: 1062 - protein, 736 aa, synthetic construct
  REGION 1..736: note = Adeno Associated Virus Capsid Protein Variant
MAADGYLPDWLEDNLSEGIREWWALKPGAPQPKANQQHQDNARGLVLPGYKYLGPGNGLDKGEPVNAADAAALEHDKAYDQQLKAGDNPYLKYNHADAEFQERLKEDTSFGGNLGRAVFQAKKRLLEPLGLVEEAAKTAPGKKRPVEQSPQEPDSSAGIGKSGAQPAKKRLNFGQTGDTESVPDPQPIGEPPAAPSGVGSLTMASGGGAPVADNNEGADGVGSSSGNWHCDSQWLGDRVITTSTRTWALPTYNNHLYKQISNSTSGGSSNDNAYFGYSTPWGYFDFNRFHCHFSPRDWQRLINNNWGFRPKRLNFKLFNIQVKEVTDNNGVKTIANNLTSTVQVFTDSDYQLPYVLGSAHEGCLPPFPADVFMIPQYGYLTLNDGSQAVGRSSFYCLEYFPSQMLRTGNNFQFSYEFENVPFHSSYAHSQSLDRLMNPLIDQYLYYLSKTINGSGQGQQTLKFSVAGYSNMAVQGRNYIPGPSYRQQRVSTTVTFNNNSEFAWPGASSWALNGRNSLMNPGPAMASHKEGEDRFFPLSGSLIFGKQGTGRDNVDADKVMITNEEEIKTTNPVATESYGQVATNHQSARAQAQTGWVQNQGILPGMVWQDRDVYLQGPIWAKIPHTDGNFHPSPLMGGFGMKHPPPQILIKNTPVPADPPTAFNKGKLNSFITQYSTGQVSVEIEWELQKENSKRWNPEIQYTSNYYKSNNVEFAVNTEGVYSEPRPIGTRYLTRNL

SEQ ID NO: 1063 - DNA, 2208 bp, synthetic construct
  misc_feature 1..2208: note = Adeno Associated Virus Capsid Protein Variant
  source 1..2208: mol_type = other DNA
atggctgccgatggttatcttccagattggctcgaggacaaccttagtgaaggaattcgcgagtggtgggctttgaaacctggagcccctcaacccaaggcaaatcaacaacatcaagacaacgctcgaggtcttgtgcttccgggttacaaataccttggacccggcaacggactcgacaagggggagccggtcaacgcagcagacgcggcggccctcgagcacgacaaggcctacgaccagcagctcaaggccggagacaacccgtacctcaagtacaaccacgccgacgccgagttccaggagcggctcaaagaagatacgtcttttgggggcaacctcgggcgagcagtcttccaggccaaaaagaggcttcttgaacctcttggtctggttgaggaagcggctaagacggctcctggaaagaagaggcctgtagagcagtctcctcaggaaccggactcctccgcgggtattggcaaatcgggtgcacagcccgctaaaaagagactcaatttcggtcagactggcgacacagagtcagtcccagaccctcaaccaatcggagaacctcccgcagccccctcaggtgtgggatctcttacaatggcttcaggtggtggcgcaccagtggcagacaataacgaaggtgccgatggagtgggtagttcctcgggaaattggcattgcgattcccaatggctgggggacagagtcatcaccaccagcacccgaacctgggccctgcccacctacaacaatcacctctacaagcaaatctccaacagcacatctggaggatcttcaaatgacaacgcctacttcggctacagcaccccctgggggtattttgacttcaacagattccactgccacttctcaccacgtgactggcagcgactcatcaacaacaactggggattccggcctaagcgactcaacttcaagctcttcaacattcaggtcaaagaggttacggacaacaatggagtcaagaccatcgccaataaccttaccagcacggtccaggtcttcacggactcagactatcagctcccgtacgtgctcgggtcggctcacgagggctgcctcccgccgttcccagcggacgttttcatgattcctcagtacgggtatctgacgcttaatgatggaagccaggccgtgggtcgttcgtccttttactgcctggaatatttcccgtcgcaaatgctaagaacgggtaacaacttccagttcagctacgagtttgagaacgtacctttccatagcagctacgctcacagccaaagcctggaccgactaatgaatccactcatcgaccaatacttgtactatctctcaaagactattaacggttctggacagggccaacaaacgctaaaattcagtgtggccggacccagcaacatggctgtccagggaagaaactacatacctggacccagctaccgacaacaacgtgtctcaaccactgtgacttttaacaacaacagcgaatttgcttggcctggagcttcttcttgggctctcaatggacgtactagcttgatgaatcctggacctgctatggccagccacaaagaaggagaggaccgtttctttcctttgtctggatctttaatttttggcaaacaaggaactggaagagacaacgtggatgcggacaaagtcatgataaccaacgaagaagaaattaaaactactaacccggtagcaacggagtcctatggacaagtggccacaaaccaccagagtgcccgggcacaggcgcagaccggctgggttcaaaaccaaggaatacttccgggtatggtttggcaggacagagatgtgtacctgcaaggacccatttgggccaaaattcctcacacggacggcaactttcacccttctccgctgatgggagggtttggaatgaagcacccgcctcctcagatcctcatcaaaaacacacctgtacctgcggatcctccaacggccttcaacaagggcaagctgaactctttcatcacccagtattctactggccaagtcagcgtggagatcgagtgggagctgcagaaggaaaacagcaagcgctggaacccggagatccagtacacttccaactattacaagtctaataatgttgaatttgctgttaatactgaaggtgtatatagtgaaccccgccccattggcaccagatacctgactcgtaatctg

SEQ ID NO: 1064 - protein, 736 aa, synthetic construct
  REGION 1..736: note = Adeno Associated Virus Capsid Protein Variant
MAADGYLPDWLEDNLSEGIREWWALKPGAPQPKANQQHQDNARGLVLPGYKYLGPGNGLDKGEPVNAADAAALEHDKAYDQQLKAGDNPYLKYNHADAEFQERLKEDTSFGGNLGRAVFQAKKRLLEPLGLVEEAAKTAPGKKRPVEQSPQEPDSSAGIGKSGAQPAKKRLNFGQTGDTESVPDPQPIGEPPAAPSGVGSLTMASGGGAPVADNNEGADGVGSSSGNWHCDSQWLGDRVITTSTRTWALPTYNNHLYKQISNSTSGGSSNDNAYFGYSTPWGYFDFNRFHCHFSPRDWQRLINNNWGFRPKRLNFKLFNIQVKEVTDNNGVKTIANNLTSTVQVFTDSDYQLPYVLGSAHEGCLPPFPADVFMIPQYGYLTLNDGSQAVGRSSFYCLEYFPSQMLRTGNNFQFSYEFENVPFHSSYAHSQSLDRLMNPLIDQYLYYLSKTINGSGQGQQTLKFSVAGPSNMAVQGRNYIPGPSYRQQRVSTTVTFNNNSEFAWPGASSWALNGRTSLMNPGPAMASHKEGEDRFFPLSGSLIFGKQGTGRDNVDADKVMITNEEEIKTTNPVATESYGQVATNHQSARAQAQTGWVQNQGILPGMVWQDRDVYLQGPIWAKIPHTDGNFHPSPLMGGFGMKHPPPQILIKNTPVPADPPTAFNKGKLNSFITQYSTGQVSVEIEWELQKENSKRWNPEIQYTSNYYKSNNVEFAVNTEGVYSEPRPIGTRYLTRNL

SEQ ID NO: 1065 - DNA, 2208 bp, synthetic construct
  misc_feature 1..2208: note = Adeno Associated Virus Capsid Protein Variant
  source 1..2208: mol_type = other DNA
atggctgccgatggttatcttccagattggctcgaggacaaccttagtgaaggaattcgcgagtggtgggctttgaaacctggagcccctcaacccaaggcaaatcaacaacatcaagacaacgctcgaggtcttgtgcttccgggttacaaataccttggacccggcaacggactcgacaagggggagccggtcaacgcagcagacgcggcggccctcgagcacgacaaggcctacgaccagcagctcaaggccggagacaacccggatctcaagtacaaccacgccgacgccgagttccaggagcggctcaaagaagatacgtcttttgggggcaacctcgggcgagcagtcttccaggccaaaaagaggcttcttgaacctcttggtctggttgaggaagcggctaagacggctcctggaaagaagaggcctgtagagcagtctcctcaggaaccggactcctccgcgggtattggcaaatcgggtgcacagcccgctaaaaagagactcaatttcggtcagactggcgacacagagtcagtcccagaccctcaaccaatcggagaacctcccgcagccccctcaggtgtgggatctcttacaatggcttcaggtggtggcgcaccagtggcagacaataacgaaggtgccgatggagtgggtagttcctcgggaaattggcattgcgattcccaatggctgggggacagagtcatcaccaccagcacccgaacctgggccctgcccacctacaacaatcacctctacaagcaaatctccaacagcacatctggaggatcttcaaatgacaatgcctacttcggctacagcaccccctgggggtattttgacttcaacagattccactgccacttctcaccgcgtgactggcagcgactcatcaacaacaactggggattccggcctaagcgactcaacttcaagctcttcaacattcaggtcaaagaggttacggacaacaatggagtcaagaccatcgccaataaccttaccagcacggtccaggtcttcacggactcagactatcagctcccgtacgtgctcgggtcggctcacgagggctgcctcccgccgttcccagcggacgttttcatgattcctcagtacgggtatctgacgcttaatgatggaagccaggccgtgggtcgttcgtccttttactgcctggaatatttcccgtcgcaaatgctaagaacgggtaacaacttccagttcagctacgagtttgagaacgtacctttccatagcagctacgctcacagccaaagcctggaccgactaatgaatccactcatcgaccaatacttgtactatctctcaaagactattaacggttctggacagggccaacaaacgctaaaattcagtgtggccggacccagcaacatggctgtccagggaagaaactacatacctggacccagctaccgacaacaacgtgtctcaaccactgtgacttttaacaacaacagcgaatttgcttggcctggagcttcttcttgggctctcaatggacgtaatagcttgatgaatcctggacctgctatggccagccacaaagaaggagaggaccgtttctttcctttgtctggatctttaatttttggcaaacaaggaactggaagagacaacgtggatgcggacaaagtcatgataaccaacgaagaagaaattaaaactactaacccggtagcaacggagtcctatggacaagtggccacaaaccaccagagtgcccgggcacaggcgcagaccggctgggttcaaaaccaaggaatacttccgggtatggtttggcaggacagagatgtgtacctgcaaggacccatttgggccaaaattcctcacacggacggcaactttcacccttctccgctgatgggagggtttggaatgaagcacccgcctcctcagatcctcatcaaaaacacacctgtacctgcggatcctccaacggccttcaacaagggcaagctgaactctttcatcacccagtattctactggccaagtcagcgtggagatcgagtgggagctgcagaaggaaaacagcaagcgctggaacccggagatccagtacacttccaactattacaagtctaataatgttgaatttgctgttaatactgaaggtgtatatagtgaaccccgccccattggcaccagatacctgactcgtaatctg

SEQ ID NO: 1066 - protein, 736 aa, synthetic construct
  REGION 1..736: note = Adeno Associated Virus Capsid Protein Variant
MAADGYLPDWLEDNLSEGIREWWALKPGAPQPKANQQHQDNARGLVLPGYKYLGPGNGLDKGEPVNAADAAALEHDKAYDQQLKAGDNPDLKYNHADAEFQERLKEDTSFGGNLGRAVFQAKKRLLEPLGLVEEAAKTAPGKKRPVEQSPQEPDSSAGIGKSGAQPAKKRLNFGQTGDTESVPDPQPIGEPPAAPSGVGSLTMASGGGAPVADNNEGADGVGSSSGNWHCDSQWLGDRVITTSTRTWALPTYNNHLYKQISNSTSGGSSNDNAYFGYSTPWGYFDFNRFHCHFSPRDWQRLINNNWGFRPKRLNFKLFNIQVKEVTDNNGVKTIANNLTSTVQVFTDSDYQLPYVLGSAHEGCLPPFPADVFMIPQYGYLTLNDGSQAVGRSSFYCLEYFPSQMLRTGNNFQFSYEFENVPFHSSYAHSQSLDRLMNPLIDQYLYYLSKTINGSGQGQQTLKFSVAGPSNMAVQGRNYIPGPSYRQQRVSTTVTFNNNSEFAWPGASSWALNGRNSLMNPGPAMASHKEGEDRFFPLSGSLIFGKQGTGRDNVDADKVMITNEEEIKTTNPVATESYGQVATNHQSARAQAQTGWVQNQGILPGMVWQDRDVYLQGPIWAKIPHTDGNFHPSPLMGGFGMKHPPPQILIKNTPVPADPPTAFNKGKLNSFITQYSTGQVSVEIEWELQKENSKRWNPEIQYTSNYYKSNNVEFAVNTEGVYSEPRPIGTRYLTRNL

SEQ ID NO: 1067 - DNA, 2208 bp, synthetic construct
  misc_feature 1..2208: note = Adeno Associated Virus Capsid Protein Variant
  source 1..2208: mol_type = other DNA
atggctgccgatggttatcttccagattggctcgaggacaaccttagtgaaggaattcgcgagtggtgggctttgaaacctggagcccctcaacccaaggcaaatcaacaacatcaagacaacgctcgaggtcttgtgcttccgggttacaaataccttggacccggcaacggactcgacaagggggagccggtcaacgcagcagacgcggcggccctcgagcacgacaaggcctacgaccagcagctcaaggccggagacaacccgtacctcaagtacaaccacgccgacgccgaggtacaggagcggctcaaagaagatacgtcttttgggggcaacctcgggcgagcagtcttccaggccaaaaagaggcttcttgaacctcttggtctggttgaggaagcggctaagacggctcctggaaagaagaggcctgtagagcagtctcctcaggaaccggactcctccgcgggtattggcaaatcgggtgcacagcccgctaaaaagagactcaatttcggtcagactggcgacacagagtcagtcccagaccctcaaccaatcggagaacctcccgcagccccctcaggtgtgggatctcttacaatggcttcaggtggtggcgcaccagtggcagacaataacgaaggtgccgatggagtgggtagttcctcgggaaattggcattgcgattcccaatggctgggggacagagtcatcaccaccagcacccgaacctgggccctgcccacctacaacaatcacctctacaagcaaatctccaacagcacatctggaggatcttcaaatgacaacgcctacttcggctacagcaccccctgggggtattttgacttcaacagattccactgccacttctcaccacgtgactggcagcgactcatcaacaacaactggggattccggcctaagcgactcaacttcaagctcttcaacattcaggtcaaagaggttacggacaacaatggagtcaagaccatcgccaataaccttaccagcacggtccaggtcttcacggactcagactatcagctcccgtacgtgctcgggtcggctcacgagggctgcctcccgccgttcccagcggacgttttcatgattcctcagtacgggtatctgacgcttaatgatggaagccaggccgtgggtcgttcgtccttttactgcctggaatatttcccgtcgcaaatgctaagaacgggtaacaacttccagttcagctacgagtttgagaacgtacctttccatagcagctacgctcacagccaaagcctggaccgactaatgaatccactcatcgaccaatacttgtactatctctcaaagactattaacggttctggacagggccaacaaacgctaaaattcagtgtggccggacccagcaacatggctgtccagggaagaaactacatacctggacccagctaccgacaacaacgtgtctcaaccactgtgacttttaacaacaacagcgaatttgcttggcctggagcttcttcttgggctctcaatggacgtaatagcttgatgaatcctggacctgctatggccagccacaaagaaggagaggaccgtttctttcctttgtctggatctttaatttttggcaaacaaggaactggaagagacaacgtggatgcggacaaagtcatgataaccaacgaagaagaaattaaaactactaacccggtagcaacggagtcctatggacaagtggccacaaaccaccagagtgcccgggcacaggcgcagaccggctgggttcaaaaccaaggaatacttccgggtatggtttggcaggacagagatgtgtacctgcaaggacccatttgggccaaaattcctcacacggacggcaactttcacccttctccgctgatgggagggtttggaatgaagcacccgcctcctcagatcctcatcaaaaacacacctgtacctgcggatcctccaacggccttcaacaagggcaagctgaactctttcatcacccagtattctactggccaagtcagcgtggagatcgagtgggagctgcagaaggaaaacagcaagcgctggaacccggagatccagtacacttccaactattacaagtctaataatgttgaatttgctgttaatactgaaggtgtatatagtgaaccccgccccattggcaccagatacctgactcgtaatctg

SEQ ID NO: 1068 - protein, 736 aa, synthetic construct; identical to SEQ ID NO: 1042
  REGION 1..736: note = Adeno Associated Virus Capsid Protein Variant

SEQ ID NO: 1069 - DNA, 2208 bp, synthetic construct
  misc_feature 1..2208: note = Adeno Associated Virus Capsid Protein Variant
  source 1..2208: mol_type = other DNA
atggctgccgatggttatcttccagattggctcgaggacaaccttagtgaaggaattcgcgagtggtgggctttgaaacctggagcccctcaacccaaggcaaatcaacaacatcaagacaacgctcgaggtcttgtgcttccgggttacaaataccttggacccggcaacggactcgacaagggggagccggtcaacgcagcagacgcggcggccctcgagcacgacaaggcctacgaccagcagctcaaggccggagacaacccgtacctcaagtacaaccacgccgacgccgagttccaggagcggctcaaagaagatacgtcttttgggggcaacctcgggcgagcagtcttccaggccaaaaagaggcttcttgaacctcttggtctggttgaggaagcggctaagacggctcctggaaagaagaggcctgtagagcagtctcctcaggaaccggactcctccgcgggtattggcaaatcgggtgcacagcccgctaaaaagagactcaatttcggtcagactggcgacacagagtcagtcccagaccctcaaccaatcggagaacctcccgcagccccctcaggtgtgggatctcttacaatggcttcaggtggtggcgcaccagtggcagacaataacgaaggtgccgatggagtgggtagttcctcgggaaattggcattgcgattcccaatggctgggggacagagtcatcaccaccagcacccgaacctgggccctgcccacctacaacaatcacctctacaagcaaatctccaacagcacatctggaggatcttcaaatgacaacgcctacttcggctacagcaccccctgggggtattttgacttcaacagattccactgccacttctcaccacgtgactggcagcgactcatcaacaacaactggggattccggcctaagcgactcaacttcaagctcttcaacattcaggtcaaagaggttacggacaacaatggagtcaagaccatcgccaataaccttaccagcacggtccaggtcttcacggactcagactatcagctcccgtacgtgctcgggtcggctcacgagggctgcctcccgccgttcccagcggacgttttcatgattcctcagtacgggtatctgacgcttaatgatggaagccaggccgtgggtcgttcgtccttttactgcctggaatatttcccgtcgcaaatgctaagaacgggtaacaacttccagttcagctacgagtttgagaacgtacctttccatagcagctacgctcacagccaaagcctggaccgactaatgaatccactcatcgaccaatacttgtactatctctcaaagactattaacggttctggacagggccaacaaacgctaaaattcagtgtggccggacccagcaacatggctgtccagggaagaaactacatacctggacccagctaccgacaacaacgtgtctcaaccactgtgacttttaacaacaacagcgaatttgcttggcctggagcttcttcttgggctctcaatggacgtaatagcttgatgaatcctggacctgctatggccagccacaaagaaggagaggaccgtttctttcctttgtctggatctttaatttttggcaaacaaggaactggaagagacaacgtggatgcggacaaagtcatgataaccaacgaagcggaaattaaaactactaacccggtagcaacggagtcctatggacaagtggccacaaaccaccagagtgcccgggcacaggcgcagaccggctgggttcaaaaccaaggaatacttccgggtatggtttggcaggacagagatgtgtacctgcaaggacccatttgggccaaaattcctcacacggacggcaactttcacccttctccgctgatgggagggtttggaatgaagcacccgcctcctcagatcctcatcaaaaacacacctgtacctgcggatcctccaacggccttcaacaagggcaagctgaactctttcatcacccagtattctactggccaagtcagcgtggagatcgagtgggagctgcagaaggaaaacagcaagcgctggaacccggagatccagtacacttccaactattacaagtctaataatgttgaatttgctgttaatactgaaggtgtatatagtgaaccccgccccattggcaccagatacctgactcgtaatctg

SEQ ID NO: 1070 - protein, 736 aa, synthetic construct
  REGION 1..736: note = Adeno Associated Virus Capsid Protein Variant
MAADGYLPDWLEDNLSEGIREWWALKPGAPQPKANQQHQDNARGLVLPGYKYLGPGNGLDKGEPVNAADAAALEHDKAYDQQLKAGDNPYLKYNHADAEFQERLKEDTSFGGNLGRAVFQAKKRLLEPLGLVEEAAKTAPGKKRPVEQSPQEPDSSAGIGKSGAQPAKKRLNFGQTGDTESVPDPQPIGEPPAAPSGVGSLTMASGGGAPVADNNEGADGVGSSSGNWHCDSQWLGDRVITTSTRTWALPTYNNHLYKQISNSTSGGSSNDNAYFGYSTPWGYFDFNRFHCHFSPRDWQRLINNNWGFRPKRLNFKLFNIQVKEVTDNNGVKTIANNLTSTVQVFTDSDYQLPYVLGSAHEGCLPPFPADVFMIPQYGYLTLNDGSQAVGRSSFYCLEYFPSQMLRTGNNFQFSYEFENVPFHSSYAHSQSLDRLMNPLIDQYLYYLSKTINGSGQGQQTLKFSVAGPSNMAVQGRNYIPGPSYRQQRVSTTVTFNNNSEFAWPGASSWALNGRNSLMNPGPAMASHKEGEDRFFPLSGSLIFGKQGTGRDNVDADKVMITNEAEIKTTNPVATESYGQVATNHQSARAQAQTGWVQNQGILPGMVWQDRDVYLQGPIWAKIPHTDGNFHPSPLMGGFGMKHPPPQILIKNTPVPADPPTAFNKGKLNSFITQYSTGQVSVEIEWELQKENSKRWNPEIQYTSNYYKSNNVEFAVNTEGVYSEPRPIGTRYLTRNL

SEQ ID NO: 1071 - DNA, 2208 bp, synthetic construct
  misc_feature 1..2208: note = Adeno Associated Virus Capsid Protein Variant
  source 1..2208: mol_type = other DNA
atggctgccgatggttatcttccagattggctcgaggacaaccttagtgaaggaattcgcgagtggtgggctttgaaacctggagcccctcaacccaaggcaaatcaacaacatcaagacaacgctcgaggtcttgtgcttccgggttacaaataccttggacccggcaacggactcgacaagggggagccggtcaacgcagcagacgcggcggccctcgagcacgacaaggcctacgaccagcagctcaaggccggagacaacccgacgctcaagtacaaccacgccgacgccgagttccaggagcggctcaaagaagatacgtcttttgggggcaacctcgggcgagcagtcttccaggccaaaaagaggcttcttgaacctcttggtctggttgaggaagcggctaagacggctcctggaaagaagaggcctgtagagcagtctcctcaggaaccggactcctccgcgggtattggcaaatcgggtgcacagcccgctaaaaagagactcaatttcggtcagactggcgacacagagtcagtcccagaccctcaaccaatcggagaacctcccgcagccccctcaggtgtgggatctcttacaatggcttcaggtggtggcgcaccagtggcagacaataacgaaggtgccgatggagtgggtagttcctcgggaaattggcattgcgattcccaatggctgggggacagagtcatcaccaccagcacccgaacctgggccctgcccacctacaacaatcacctctacaagcaaatctccaacagcacatctggaggatcttcaaatgacaacgcctacttcggctacagcaccccctgggggtattttgacttcaacagattccactgccacttctcaccacgtgactggcagcgactcatcaacaacaactggggattccggcctaagcgactcaacttcaagctcttcaacattcaggtcaaagaggttacggacaacaatggagtcaagaccatcgccaataaccttaccagcacggtccaggtcttcacggactcagactatcagctcccgtacgtgctcgggtcggctcacgagggctgcctcccgccgttcccagcggacgttttcatgattcctcagtacgggtatctgacgcttaatgatggaagccaggccgtgggtcgttcgtccttttactgcctggaatatttcccgtcgcaaatgctaagaacgggtaacaacttccagttcagctacgagtttgagaacgtacctttccatagcagctacgctcacagccaaagcctggaccgactaatgaatccactcatcgaccaatacttgtactatctctcaaagactattaacggttctggacagggccaacaaacgctaaaattcagtgtggccggacccagcaacatggctgtccagggaagaaactacatacctggacccagctaccgacaacaacgtgtctcaaccactgtgacttttaacaacaacagcgaatttgcttggcctggagcttcttcttgggctctcaatggacgtaatagcttgatgaatcctggacctgctatggccagccacaaagaaggagaggaccgtttctttcctttgtctggatctttaatttttggcaaacaaggaactggaagagacaacgtggatgcggacaaagtcatgataaccaacgaagaagaaattaaaactactaacccggtagcaacggagtcctatggacaagtggccacaaaccaccagagtgcccgggcacaggcgcagaccggctgggttcaaaaccaaggaatacttccgggtatggtttggcaggacagagatgtgtacctgcaaggacccatttgggccaaaattcctcacacggacggcaactttcacccttctccgctgatgggagggtttggaatgaagcacccgcctcctcagatcctcatcaaaaacacacctgtacctgcggatcctccaacggccttcaacaagggcaagctgaactctttcatcacccagtattctactggccaagtcagcgtggagatcgagtgggagctgcagaaggaaaacagcaagcgctggaacccggagatccagtacacttccaactattacaagtctaataatgttgaatttgctgttaatactgaaggtgtatatagtgaaccccgccccattggcaccagatacctgactcgtaatctg

SEQ ID NO: 1072 - protein, 736 aa, synthetic construct
  REGION 1..736: note = Adeno Associated Virus Capsid Protein Variant
MAADGYLPDWLEDNLSEGIREWWALKPGAPQPKANQQHQDNARGLVLPGYKYLGPGNGLDKGEPVNAADAAALEHDKAYDQQLKAGDNPTLKYNHADAEFQERLKEDTSFGGNLGRAVFQAKKRLLEPLGLVEEAAKTAPGKKRPVEQSPQEPDSSAGIGKSGAQPAKKRLNFGQTGDTESVPDPQPIGEPPAAPSGVGSLTMASGGGAPVADNNEGADGVGSSSGNWHCDSQWLGDRVITTSTRTWALPTYNNHLYKQISNSTSGGSSNDNAYFGYSTPWGYFDFNRFHCHFSPRDWQRLINNNWGFRPKRLNFKLFNIQVKEVTDNNGVKTIANNLTSTVQVFTDSDYQLPYVLGSAHEGCLPPFPADVFMIPQYGYLTLNDGSQAVGRSSFYCLEYFPSQMLRTGNNFQFSYEFENVPFHSSYAHSQSLDRLMNPLIDQYLYYLSKTINGSGQGQQTLKFSVAGPSNMAVQGRNYIPGPSYRQQRVSTTVTFNNNSEFAWPGASSWALNGRNSLMNPGPAMASHKEGEDRFFPLSGSLIFGKQGTGRDNVDADKVMITNEEEIKTTNPVATESYGQVATNHQSARAQAQTGWVQNQGILPGMVWQDRDVYLQGPIWAKIPHTDGNFHPSPLMGGFGMKHPPPQILIKNTPVPADPPTAFNKGKLNSFITQYSTGQVSVEIEWELQKENSKRWNPEIQYTSNYYKSNNVEFAVNTEGVYSEPRPIGTRYLTRNL

SEQ ID NO: 1073 - DNA, 2208 bp, synthetic construct
  misc_feature 1..2208: note = Adeno Associated Virus Capsid Protein Variant
  source 1..2208: mol_type = other DNA
atggctgccgatggttatcttccagattggctcgaggacaaccttagtgaaggaattcgcgagtggtgggctttgaaacctggagcccctcaacccaaggcaaatcaacaacatcaagacaacgctcgaggtcttgtgcttccgggttacaaataccttggacccggcaacggactcgacaagggggagccggtcaacgcagcagacgcggcggccctcgagcacgacaaggcctacgaccagcagctcaaggccggagacaacccgtacctcaagtacaaccacgccgacgccgagttccaggagcggctcaaagaagatacgtcttttgggggcaacctcgggcgagcagtcttccaggccaaaaagaggcttcttgaacctcttggtctggttgaggaagcggctaagacggctcctggaaagaagaggcctgtagagcagtctcctcaggaaccggactcctccgcgggtattggcaaatcgggtgcacagcccgctaaaaagagactcaatttcggtcagactggcgacacagagtcagtcccagaccctcaaccaatcggagaacctcccgcagccccctcaggtgtgggatctcttacaatggcttcaggtggtggcgcaccagtggcagacaataacgaaggtgccgatggagtgggtagttcctcgggaaattggcattgcgattcccaatggctgggggacagagtcatcaccaccagcacccgaacctgggccctgcccacctacaacaatcacctctacaagcaaatctccaacagcacatctggaggatcttcaaatgacaacgcctacttcggctacagcaccccctgggggtattttgacttcaacagattccactgccacttctcaccacgtgactggcagcgactcatcaacaacaactggggattccggcctaagcgactcaacttcaagctcttcaacattcaggtcaaagaggttacggacaacaatggagtcaagaccatcgccaataaccttaccagcacggtccaggtcttcacggactcagactatcagctcccgtacgtgctcgggtcggctcacgagggctgcctcccgccgttcccagcggacgttttcatgattcctcagtacgggtatctgacgcttaatgatggaagccaggccgtgggtcgttcgtccttttactgcctggaatatttcccgtcgcaaatgctaagaacgggtaacaacttccagttcagctacgagtttgagaacgtacctttccatagcagctacgctcacagccaaagcctggaccgactaatgaatccactcatcgaccaatacttgtactatctctcaaagactattaacggttctggacagggccaacaaacgctaaaattcagtgtggccggacccagcaacatggctgtccagggaagaaactacatacctggacccagctaccgacaacaacgtgtctcaaccactgtgacttttaacaacaacagcgaatttgcttggcctggagcttcttcttggtgtctcaatggacgtaatagcttgatgaatcctggacctgctatggccagccacaaagaaggagaggaccgtttctttcctttgtctggatctttaatttttggcaaacaaggaactggaagagacaacgtggatgcggacaaagtcatgataaccaacgaagaagaaattaaaactactaacccggtagcaacggagtcctatggacaagtggccacaaaccaccagagtgcccgggcacaggcgcagaccggctgggttcaaaaccaaggaatacttccgggtatggtttggcaggacagagatgtgtacctgcaaggacccatttgggccaaaattcctcacacggacggcaactttcacccttctccgctgatgggagggtttggaatgaagcacccgcctcctcagatcctcatcaaaaacacacctgtacctgcggatcctccaacggccttcaacaagggcaagctgaactctttcatcacccagtattctactggccaagtcagcgtggagatcgagtgggagctgcagaaggaaaacagcaagcgctggaacccggagatccagtacacttccaactattacaagtctaataatgttgaatttgctgttaatactgaaggtgtatatagtgaaccccgccccattggcaccagatacctgactcgtaatctg

SEQ ID NO: 1074 - protein, 736 aa, synthetic construct
  REGION 1..736: note = Adeno Associated Virus Capsid Protein Variant
MAADGYLPDWLEDNLSEGIREWWALKPGAPQPKANQQHQDNARGLVLPGYKYLGPGNGLDKGEPVNAADAAALEHDKAYDQQLKAGDNPYLKYNHADAEFQERLKEDTSFGGNLGRAVFQAKKRLLEPLGLVEEAAKTAPGKKRPVEQSPQEPDSSAGIGKSGAQPAKKRLNFGQTGDTESVPDPQPIGEPPAAPSGVGSLTMASGGGAPVADNNEGADGVGSSSGNWHCDSQWLGDRVITTSTRTWALPTYNNHLYKQISNSTSGGSSNDNAYFGYSTPWGYFDFNRFHCHFSPRDWQRLINNNWGFRPKRLNFKLFNIQVKEVTDNNGVKTIANNLTSTVQVFTDSDYQLPYVLGSAHEGCLPPFPADVFMIPQYGYLTLNDGSQAVGRSSFYCLEYFPSQMLRTGNNFQFSYEFENVPFHSSYAHSQSLDRLMNPLIDQYLYYLSKTINGSGQGQQTLKFSVAGPSNMAVQGRNYIPGPSYRQQRVSTTVTFNNNSEFAWPGASSWCLNGRNSLMNPGPAMASHKEGEDRFFPLSGSLIFGKQGTGRDNVDADKVMITNEEEIKTTNPVATESYGQVATNHQSARAQAQTGWVQNQGILPGMVWQDRDVYLQGPIWAKIPHTDGNFHPSPLMGGFGMKHPPPQILIKNTPVPADPPTAFNKGKLNSFITQYSTGQVSVEIEWELQKENSKRWNPEIQYTSNYYKSNNVEFAVNTEGVYSEPRPIGTRYLTRNL

SEQ ID NO: 1075 - DNA, 2208 bp, synthetic construct
  misc_feature 1..2208: note = Adeno Associated Virus Capsid Protein Variant
  source 1..2208: mol_type = other DNA
atggctgccgatggttatcttccagattggctcgaggacaaccttagtgaaggaattcgcgagtggtgggctttgaaacctggagcccctcaacccaaggcaaatcaacaacatcaagacaacgctcgaggtcttgtgcttccgggttacaaataccttggacccggcaacggactcgacaagggggagccggtcaacgcagcagacgcggcggccctcgagcacgacaaggcctacgaccagcagctcaaggccggagacaacccgtacctcaagtacaaccacgccgacgccgagttccaggagcggctcaaagaagatacgtcttttgggggcaacctcgggcgagcagtcttccaggccaaaaagaggcttcttgaacctcttggtctggttgaggaagcggctaagacggctcctggaaagaagaggcctgtagagcagtctcctcaggaaccggactcctccgcgggtattggcaaatcgggtgcacagcccgctaaaaagagactcaatttcggtcagactggcgacacagagtcagtcccagaccctcaaccaatcggagaacctcccgcagccccctcaggtgtgggatctcttacaatggcttcaggtggtggcgcaccagtggcagacaataacgaaggtgccgatggagtgggtagttcctcgggaaattggcattgcgattcccaatggctgggggacagagtcatcaccaccagcacccgaacctgggccctgcccacctacaacaatcacctctacaagcaaatctccaacagcacatctggaggatcttcaatggacaacgcctacttcggctacagcaccccctgggggtattttgacttcaacagattccactgccacttctcaccacgtgactggcagcgactcatcaacaacaactggggattccggcctaagcgactcaacttcaagctcttcaacattcaggtcaaagaggttacggacaacaatggagtcaagaccatcgccaataaccttaccagcacggtccaggtcttcacggactcagactatcagctcccgtacgtgctcgggtcggctcacgagggctgcctcccgccgttcccagcggacgttttcatgattcctcagtacgggtatctgacgcttaatgatggaagccaggccgtgggtcgttcgtccttttactgcctggaatatttcccgtcgcaaatgctaagaacgggtaacaacttccagttcagctacgagtttgagaacgtacctttccatagcagctacgctcacagccaaagcctggaccgactaatgaatccactcatcgaccaatacttgtactatctctcaaagactattaacggttctggacagggccaacaaacgctaaaattcagtgtggccggacccagcaacatggctgtccagggaagaaactacatacctggacccagctaccgacaacaacgtgtctcaaccactgtgacttttaacaacaacagcgaatttgcttggcctggagcttcttcttgggctctcaatggacgtaatagcttgatgaatcctggacctgctatggccagccacaaagaaggagaggaccgtttctttcctttgtctggatctttaatttttggcaaacaaggaactggaagagacaacgtggatgcggacaaagtcatgataaccaacgaagaagaaattaaaactactaacccggtagcaacggagtcctatggacaagtggccacaaaccaccagagtgcccgggcacaggcgcagaccggctgggttcaaaaccaaggaatacttccgggtatggtttggcaggacagagatgtgtacctgcaaggacccatttgggccaaaattcctcacacggacggcaactttcacccttctccgctgatgggagggtttggaatgaagcacccgcctcctcagatcctcatcaaaaacacacctgtacctgcggatcctccaacggccttcaacaagggcaagctgaactctttcatcacccagtattctactggccaagtcagcgtggagatcgagtgggagctgcagaaggaaaacagcaagcgctggaacccggagatccagtacacttccaactattacaagtctaataatgttgaatttgctgttaatactgaaggtgtatatagtgaaccccgccccattggcaccagatacctgactcgtaatctg

SEQ ID NO: 1076 - protein, 736 aa, synthetic construct
  REGION 1..736: note = Adeno Associated Virus Capsid Protein Variant
MAADGYLPDWLEDNLSEGIREWWALKPGAPQPKANQQHQDNARGLVLPGYKYLGPGNGLDKGEPVNAADAAALEHDKAYDQQLKAGDNPYLKYNHADAEFQERLKEDTSFGGNLGRAVFQAKKRLLEPLGLVEEAAKTAPGKKRPVEQSPQEPDSSAGIGKSGAQPAKKRLNFGQTGDTESVPDPQPIGEPPAAPSGVGSLTMASGGGAPVADNNEGADGVGSSSGNWHCDSQWLGDRVITTSTRTWALPTYNNHLYKQISNSTSGGSSMDNAYFGYSTPWGYFDFNRFHCHFSPRDWQRLINNNWGFRPKRLNFKLFNIQVKEVTDNNGVKTIANNLTSTVQVFTDSDYQLPYVLGSAHEGCLPPFPADVFMIPQYGYLTLNDGSQAVGRSSFYCLEYFPSQMLRTGNNFQFSYEFENVPFHSSYAHSQSLDRLMNPLIDQYLYYLSKTINGSGQGQQTLKFSVAGPSNMAVQGRNYIPGPSYRQQRVSTTVTFNNNSEFAWPGASSWALNGRNSLMNPGPAMASHKEGEDRFFPLSGSLIFGKQGTGRDNVDADKVMITNEEEIKTTNPVATESYGQVATNHQSARAQAQTGWVQNQGILPGMVWQDRDVYLQGPIWAKIPHTDGNFHPSPLMGGFGMKHPPPQILIKNTPVPADPPTAFNKGKLNSFITQYSTGQVSVEIEWELQKENSKRWNPEIQYTSNYYKSNNVEFAVNTEGVYSEPRPIGTRYLTRNL

SEQ ID NO: 1077 - DNA, 2208 bp, synthetic construct
  misc_feature 1..2208: note = Adeno Associated Virus Capsid Protein Variant
  source 1..2208: mol_type = other DNA
atggctgccgatggttatcttccagattggctcgaggacaaccttagtgaaggaattcgcgagtggtgggctttgaaacctggagcccctcaacccaaggcaaatcaacaacatcaagacaacgctcgaggtcttgtgcttccgggttacaaataccttggacccggcaacggactcgacaagggggagccggtcaacgcagcagacgcggcggccctcgagcacgacaaggcctacgaccagcagctcaaggccggagacaacccgtacctcaagtacaaccacgccgacgccgagttccaggagcggctcaaagaagatacgtcttttgggggcaacctcgggcgagcagtcttccaggccaaaaagaggcttcttgaacctcttggtctggttgaggaagcggctaagacggctcctggaaagaagaggcctgtagagcagtctcctcaggaaccggactcctccgcgggtattggcaaatcgggtgcacagcccgctaaaaagagactcaatttcggtcagactggcgacacagagtcagtcccagaccctcaaccaatcggagaacctcccgcagccccctcaggtgtgggatctcttacaatggcttcaggtggtggcgcaccagtggcagacaataacgaaggtgccgatggagtgggtagttcctcgggaaattggcattgcgattcccaatggctgggggacagagtcatcaccaccagcacccgaacctgggccctgcccacctacaacaatcacctctacaagcaaatctccaacagcacatctggaggatcttcaaatgacaacgcctacttcggctacagcaccccctgggggtattttgacttcaacagattccactgccacttctcaccacgtgactggcagcgactcatcaacaacaactggggattccggcctaagcgactcaacttcaagctcttcaacattcaggtcaaagaggttacggacaacaatggagtcaagaccatcgccaataaccttaccagcacggtccaggtcttcacggactcagactatcagctcccgtacgtgctcgggtcggctcacgagggctgcctcccgccgttcccagcggacgttttcatgattcctcagtacgggtatctgacgcttaatgatggaagccaggccgtgggtcgttcgtccttttactgcctggaatatttcccgtcgcaaatgctaagaacgggtaacaacttccagttcagctacgagtttgagaacgtacctttccatagcagctacgctcacagccaaagcctggaccgactaatgaatccactcatcgaccaatacttgtactatctctcaaagactattaacggttctggacagggccaacaaacgctaaaattcagtgtggccggacccagcaacatggctgtccagggaagaaactacatacctggacccagctaccgacaacaacgtgtctcaaccactgtgacttttaacaacaacagcgaatttgcttggcctggagcttcttcttgggctctcaatggacgtctcagcttgatgaatcctggacctgctatggccagccacaaagaaggagaggaccgtttctttcctttgtctggatctttaatttttggcaaacaaggaactggaagagacaacgtggatgcggacaaagtcatgataaccaacgaagaagaaattaaaactactaacccggtagcaacggagtcctatggacaagtggccacaaaccaccagagtgcccgggcacaggcgcagaccggctgggttcaaaaccaaggaatacttccgggtatggtttggcaggacagagatgtgtacctgcaaggacccatttgggccaaaattcctcacacggacggcaactttcacccttctccgctgatgggagggtttggaatgaagcacccgcctcctcagatcctcatcaaaaacacacctgtacctgcggatcctccaacggccttcaacaagggcaagctgaactctttcatcacccagtattctactggccaagtcagcgtggagatcgagtgggagctgcagaaggaaaacagcaagcgctggaacccggagatccagtacacttccaactattacaagtctaataatgttgaatttgctgttaatactgaaggtgtatatagtgaaccccgccccattggcaccagatacctgactcgtaatctg

SEQ ID NO: 1078 - protein, 736 aa, synthetic construct
  REGION 1..736: note = Adeno Associated Virus Capsid Protein Variant
MAADGYLPDWLEDNLSEGIREWWALKPGAPQPKANQQHQDNARGLVLPGYKYLGPGNGLDKGEPVNAADAAALEHDKAYDQQLKAGDNPYLKYNHADAEFQERLKEDTSFGGNLGRAVFQAKKRLLEPLGLVEEAAKTAPGKKRPVEQSPQEPDSSAGIGKSGAQPAKKRLNFGQTGDTESVPDPQPIGEPPAAPSGVGSLTMASGGGAPVADNNEGADGVGSSSGNWHCDSQWLGDRVITTSTRTWALPTYNNHLYKQISNSTSGGSSNDNAYFGYSTPWGYFDFNRFHCHFSPRDWQRLINNNWGFRPKRLNFKLFNIQVKEVTDNNGVKTIANNLTSTVQVFTDSDYQLPYVLGSAHEGCLPPFPADVFMIPQYGYLTLNDGSQAVGRSSFYCLEYFPSQMLRTGNNFQFSYEFENVPFHSSYAHSQSLDRLMNPLIDQYLYYLSKTINGSGQGQQTLKFSVAGPSNMAVQGRNYIPGPSYRQQRVSTTVTFNNNSEFAWPGASSWALNGRLSLMNPGPAMASHKEGEDRFFPLSGSLIFGKQGTGRDNVDADKVMITNEEEIKTTNPVATESYGQVATNHQSARAQAQTGWVQNQGILPGMVWQDRDVYLQGPIWAKIPHTDGNFHPSPLMGGFGMKHPPPQILIKNTPVPADPPTAFNKGKLNSFITQYSTGQVSVEIEWELQKENSKRWNPEIQYTSNYYKSNNVEFAVNTEGVYSEPRPIGTRYLTRNL

SEQ ID NO: 1079 - DNA, 2208 bp, synthetic construct
  misc_feature 1..2208: note = Adeno Associated Virus Capsid Protein Variant
  source 1..2208: mol_type = other DNA
atggctgccgatggttatcttccagattggctcgaggacaaccttagtgaaggaattcgcgagtggtgggctttgaaacctggagcccctcaacccaaggcaaatcaacaacatcaagacaacgctcgaggtcttgtgcttccgggttacaaataccttggacccggcaacggactcgacaagggggagccggtcaacgcagcagacgcggcggccctcgagcacgacaaggcctacgaccagcagctcaaggccggagacaacccgtacctcaagtacaaccacgccgacgccgagttccaggagcggctcaaagaagatacgtcttttgggggcaacctcgggcgagcagtcttccaggccaaaaagaggcttcttgaacctcttggtctggttgaggaagcggctaagacggctcctggaaagaagaggcctgtagagcagtctcctcaggaaccggactcctccgcgggtattggcaaatcgggtgcacagcccgctaaaaagagactcaatttcggtcagactggcgacacagagtcagtcccagaccctcaaccaatcggagaacctcccgcagccccctcaggtgtgggatctcttacaatggcttcaggtggtggcgcaccagtggcagacaataacgaaggtgccgatggagtgggtagttcctcgggaaattggcattgcgattcccaatggctgggggacagagtcatcaccaccagcacccgaacctgggccctgcccacctacaacaatcacctctacaagcaaatctccaacagcacatctggagcatcttcaaatgacaacgcctacttcggctacagcaccccctgggggtattttgacttcaacagattccactgccacttctcaccacgtgactggcagcgactcatcaacaacaactggggattccggcctaagcgactcaacttcaagctcttcaacattcaggtcaaagaggttacggacaacaatggagtcaagaccatcgccaataaccttaccagcacggtccaggtcttcacggactcagactatcagctcccgtacgtgctcgggtcggctcacgagggctgcctcccgccgttcccagcggacgttttcatgattcctcagtacgggtatctgacgcttaatgatggaagccaggccgtgggtcgttcgtccttttactgcctggaatatttcccgtcgcaaatgctaagaacgggtaacaacttccagttcagctacgagtttgagaacgtacctttccatagcagctacgctcacagccaaagcctggaccgactaatgaatccactcatcgaccaatacttgtactatctctcaaagactattaacggttctggacagggccaacaaacgctaaaattcagtgtggccggacccagcaacatggctgtccagggaagaaactacatacctggacccagctaccgacaacaacgtgtctcaaccactgtgacttttaacaacaacagcgaatttgcttggcctggagcttcttcttgggctctcaatggacgtaatagcttgatgaatcctggacctgctatggccagccacaaagaaggagaggaccgtttctttcctttgtctggatctttaatttttggcaaacaaggaactggaagagacaacgtggatgcggacaaagtcatgataaccaacgaagaagaaattaaaactactaacccggtagcaacggagtcctatggacaagtggccacaaaccaccagagtgcccgggcacaggcgcagaccggctgggttcaaaaccaaggaatacttccgggtatggtttggcaggacagagatgtgtacctgcaaggacccatttgggccaaaattcctcacacggacggcaactttcacccttctccgctgatgggagggtttggaatgaagcacccgcctcctcagatcctcatcaaaaacacacctgtacctgcggatcctccaacggccttcaacaagggcaagctgaactctttcatcacccagtattctactggccaagtcagcgtggagatcgagtgggagctgcagaaggaaaacagcaagcgctggaacccggagatccagtacacttccaactattacaagtctaataatgttgaatttgctgttaatactgaaggtgtatatagtgaaccccgccccattggcaccagatacctgactcgtaatctg

SEQ ID NO: 1080 - protein, 736 aa, synthetic construct
  REGION 1..736: note = Adeno Associated Virus Capsid Protein Variant
MAADGYLPDWLEDNLSEGIREWWALKPGAPQPKANQQHQDNARGLVLPGYKYLGPGNGLDKGEPVNAADAAALEHDKAYDQQLKAGDNPYLKYNHADAEFQERLKEDTSFGGNLGRAVFQAKKRLLEPLGLVEEAAKTAPGKKRPVEQSPQEPDSSAGIGKSGAQPAKKRLNFGQTGDTESVPDPQPIGEPPAAPSGVGSLTMASGGGAPVADNNEGADGVGSSSGNWHCDSQWLGDRVITTSTRTWALPTYNNHLYKQISNSTSGASSNDNAYFGYSTPWGYFDFNRFHCHFSPRDWQRLINNNWGFRPKRLNFKLFNIQVKEVTDNNGVKTIANNLTSTVQVFTDSDYQLPYVLGSAHEGCLPPFPADVFMIPQYGYLTLNDGSQAVGRSSFYCLEYFPSQMLRTGNNFQFSYEFENVPFHSSYAHSQSLDRLMNPLIDQYLYYLSKTINGSGQGQQTLKFSVAGPSNMAVQGRNYIPGPSYRQQRVSTTVTFNNNSEFAWPGASSWALNGRNSLMNPGPAMASHKEGEDRFFPLSGSLIFGKQGTGRDNVDADKVMITNEEEIKTTNPVATESYGQVATNHQSARAQAQTGWVQNQGILPGMVWQDRDVYLQGPIWAKIPHTDGNFHPSPLMGGFGMKHPPPQILIKNTPVPADPPTAFNKGKLNSFITQYSTGQVSVEIEWELQKENSKRWNPEIQYTSNYYKSNNVEFAVNTEGVYSEPRPIGTRYLTRNL

SEQ ID NO: 1081 - DNA, 2208 bp, synthetic construct
  misc_feature 1..2208: note = Adeno Associated Virus Capsid Protein Variant
  source 1..2208: mol_type = other DNA
atggctgccgatggttatcttccagattggctcgaggacaaccttagtgaaggaattcgcgagtggtgggctttgaaacctggagcccctcaacccaaggcaaatcaacaacatcaagacaacgctcgaggtcttgtgcttccgggttacaaataccttggacccggcaacggactcgacaagggggagccggtcaacgcagcagacgcggcggccctcgagcacgacaaggcctacgaccagcagctcaaggccggagacaacccgtacctcaagtacaaccacgccgacgccgagttccaggagcggctcaaagaagatacgtcttttgggggcaacctcgggcgagcagtcttccaggccaaaaagaggcttcttgaacctcttggtctggttgaggaagcggctaagacggctcctggaaagaagaggcctgtagagcagtctcctcaggaaccggactcctccgcgggtattggcaaatcgggtgcacagcccgctaaaaagagactcaatttcggtcagactggcgacacagagtcagtcccagaccctcaaccaatcggagaacctcccgcagccccctcaggtgtgggatctcttacaatggcttcaggtggtggcgcaccagtggcagacaataacgaaggtgccgatggagtgggtagttcctcgggaaattggcattgcgattcccaatggctgggggacagagtcatcaccaccagcacccgaacctgggccctgcccacctacaacaatcacctctacaagcaaatctccaacagcacatctggaggatcttcagcggacaacgcctacttcggctacagcaccccctgggggtattttgacttcaacagattccactgccacttctcaccacgtgactggcagcgactcatcaacaacaactggggattccggcctaagcgactcaacttcaagctcttcaacattcaggtcaaagaggttacggacaacaatggagtcaagaccatcgccaataaccttaccagcacggtccaggtcttcacggactcagactatcagctcccgtacgtgctcgggtcggctcacgagggctgcctcccgccgttcccagcggacgttttcatgattcctcagtacgggtatctgacgcttaatgatggaagccaggccgtgggtcgttcgtccttttactgcctggaatatttcccgtcgcaaatgctaagaacgggtaacaacttccagttcagctacgagtttgagaacgtacctttccatagcagctacgctcacagccaaagcctggaccgactaatgaatccactcatcgaccaatacttgtactatctctcaaagactattaacggttctggacagggccaacaaacgctaaaattcagtgtggccggacccagcaacatggctgtccagggaagaaactacatacctggacccagctaccgacaacaacgtgtctcaaccactgtgacttttaacaacaacagcgaatttgcttggcctggagcttcttcttgggctctcaatggacgtaatagcttgatgaatcctggacctgctatggccagccacaaagaaggagaggaccgtttctttcctttgtctggatctttaatttttggcaaacaaggaactggaagagacaacgtggatgcggacaaagtcatgataaccaacgaagaagaaattaaaactactaacccggtagcaacggagtcctatggacaagtggccacaaaccaccagagtgcccgggcacaggcgcagaccggctgggttcaaaaccaaggaatacttccgggtatggtttggcaggacagagatgtgtacctgcaaggacccatttgggccaaaattcctcacacggacggcaactttcacccttctccgctgatgggagggtttggaatgaagcacccgcctcctcagatcctcatcaaaaacacacctgtacctgcggatcctccaacggccttcaacaagggcaagctgaactctttcatcacccagtattctactggccaagtcagcgtggagatcgagtgggagctgcagaaggaaaacagcaagcgctggaacccggagatccagtacacttccaactattacaagtctaataatgttgaatttgctgttaatactgaaggtgtatatagtgaaccccgccccattggcaccagatacctgactcgtaatctg

SEQ ID NO: 1082 - protein, 736 aa, synthetic construct
  REGION 1..736: note = Adeno Associated Virus Capsid Protein Variant
MAADGYLPDWLEDNLSEGIREWWALKPGAPQPKANQQHQDNARGLVLPGYKYLGPGNGLDKGEPVNAADAAALEHDKAYDQQLKAGDNPYLKYNHADAEFQERLKEDTSFGGNLGRAVFQAKKRLLEPLGLVEEAAKTAPGKKRPVEQSPQEPDSSAGIGKSGAQPAKKRLNFGQTGDTESVPDPQPIGEPPAAPSGVGSLTMASGGGAPVADNNEGADGVGSSSGNWHCDSQWLGDRVITTSTRTWALPTYNNHLYKQISNSTSGGSSADNAYFGYSTPWGYFDFNRFHCHFSPRDWQRLINNNWGFRPKRLNFKLFNIQVKEVTDNNGVKTIANNLTSTVQVFTDSDYQLPYVLGSAHEGCLPPFPADVFMIPQYGYLTLNDGSQAVGRSSFYCLEYFPSQMLRTGNNFQFSYEFENVPFHSSYAHSQSLDRLMNPLIDQYLYYLSKTINGSGQGQQTLKFSVAGPSNMAVQGRNYIPGPSYRQQRVSTTVTFNNNSEFAWPGASSWALNGRNSLMNPGPAMASHKEGEDRFFPLSGSLIFGKQGTGRDNVDADKVMITNEEEIKTTNPVATESYGQVATNHQSARAQAQTGWVQNQGILPGMVWQDRDVYLQGPIWAKIPHTDGNFHPSPLMGGFGMKHPPPQILIKNTPVPADPPTAFNKGKLNSFITQYSTGQVSVEIEWELQKENSKRWNPEIQYTSNYYKSNNVEFAVNTEGVYSEPRPIGTRYLTRNL

SEQ ID NO: 1083 - DNA, 2208 bp, synthetic construct
  misc_feature 1..2208: note = Adeno Associated Virus Capsid Protein Variant
  source 1..2208: mol_type = other DNA
atggctgccgatggttatcttccagattggctcgaggacaaccttagtgaaggaattcgcgagtggtgggctttgaaacctggagcccctcaacccaaggcaaatcaacaacatcaagacaacgctcgaggtcttgtgcttccgggttacaaataccttggacccggcaacggactcgacaagggggagccggtcaacgcagcagacgcggcggccctcgagcacgacaaggcctacgaccagcagctcaaggccggagacaacccgtacctcaagtacaaccacgccgacgccgagttccaggagcggctcaaagaagatacgtcttttgggggcaacctcgggcgagcagtcttccaggccaaaaagaggcttcttgaacctcttggtctggttgaggaagcggctaagacggctcctggaaagaagaggcctgtagagcagtctcctcaggaaccggactcctccgcgggtattggcaaatcgggtgcacagcccgctaaaaagagactcaatttcggtcagactggcgacacagagtcagtcccagaccctcaaccaatcggagaacctcccgcagccccctcaggtgtgggatctcttacaatggcttcaggtggtggcgcaccagtggcagacaataacgaaggtgccgatggagtgggtagttcctcgggaaattggcattgcgattcccaatggctgggggacagagtcatcaccaccagcacccgaacctgggccctgcccacctacaacaatcacctctacaagcaaatctccaacagcacatctggaggatcttcaaatgacaacgcctacttcggctacagcaccccctgggggtattttgacttcaacagattccactgccacttctcaccacgtgactggcagcgactcatcaacaacaactggggattccggcctaagcgactcaacttcaagctcttcaacattcaggtcaaagaggttacggacaacaatggagtcaagaccatcgccaataaccttaccagcacggtccaggtcttcacggactcagactatcagctcccgtacgtgctcgggtcggctcacgagggctgcctcccgccgttcccagcggacgttttcatgattcctcagtacgggtatctgacgcttaatgatggaagccaggccgtgggtcgttcgtccttttactgcctggaatatttcccgtcgcaaatgctaagaacgggtaacaacttccagttcagctacgagtttgagaacgtacctttccatagcagctacgctcacagccaaagcctggaccgactaatgaatccactcatcgaccaatacttgtactatctctcaaagactattaacggttctggacagggccaacaaacgctaaaattcagtgtggccggatggagcaacatggctgtccagggaagaaactacatacctggacccagctaccgacaacaacgtgtctcaaccactgtgacttttaacaacaacagcgaatttgcttggcctggagcttcttcttgggctctcaatggacgtaatagcttgatgaatcctggacctgctatggccagccacaaagaaggagaggaccgtttctttcctttgtctggatctttaatttttggcaaacaaggaactggaagagacaacgtggatgcggacaaagtcatgataaccaacgaagaagaaattaaaactactaacccggtagcaacggagtcctatggacaagtggccacaaaccaccagagtgcccgggcacaggcgcagaccggctgggttcaaaaccaaggaatacttccgggtatggtttggcaggacagagatgtgtacctgcaaggacccatttgggccaaaattcctcacacggacggcaactttcacccttctccgctgatgggagggtttggaatgaagcacccgcctcctcagatcctcatcaaaaacacacctgtacctgcggatcctccaacggccttcaacaagggcaagctgaactctttcatcacccagtattctactggccaagtcagcgtggagatcgagtgggagctgcagaaggaaaacagcaagcgctggaacccggagatccagtacacttccaactattacaagtctaataatgttgaatttgctgttaatactgaaggtgtatatagtgaaccccgccccattggcaccagatacctgactcgtaatctg

SEQ ID NO: 1084 - protein, 736 aa, synthetic construct
  REGION 1..736: note = Adeno Associated Virus Capsid Protein Variant
MAADGYLPDWLEDNLSEGIREWWALKPGAPQPKANQQHQDNARGLVLPGYKYLGPGNGLDKGEPVNAADAAALEHDKAYDQQLKAGDNPYLKYNHADAEFQERLKEDTSFGGNLGRAVFQAKKRLLEPLGLVEEAAKTAPGKKRPVEQSPQEPDSSAGIGKSGAQPAKKRLNFGQTGDTESVPDPQPIGEPPAAPSGVGSLTMASGGGAPVADNNEGADGVGSSSGNWHCDSQWLGDRVITTSTRTWALPTYNNHLYKQISNSTSGGSSNDNAYFGYSTPWGYFDFNRFHCHFSPRDWQRLINNNWGFRPKRLNFKLFNIQVKEVTDNNGVKTIANNLTSTVQVFTDSDYQLPYVLGSAHEGCLPPFPADVFMIPQYGYLTLNDGSQAVGRSSFYCLEYFPSQMLRTGNNFQFSYEFENVPFHSSYAHSQSLDRLMNPLIDQYLYYLSKTINGSGQGQQTLKFSVAGWSNMAVQGRNYIPGPSYRQQRVSTTVTFNNNSEFAWPGASSWALNGRNSLMNPGPAMASHKEGEDRFFPLSGSLIFGKQGTGRDNVDADKVMITNEEEIKTTNPVATESYGQVATNHQSARAQAQTGWVQNQGILPGMVWQDRDVYLQGPIWAKIPHTDGNFHPSPLMGGFGMKHPPPQILIKNTPVPADPPTAFNKGKLNSFITQYSTGQVSVEIEWELQKENSKRWNPEIQYTSNYYKSNNVEFAVNTEGVYSEPRPIGTRYLTRNL

SEQ ID NO: 1085 - DNA, 2208 bp, synthetic construct
  misc_feature 1..2208: note = Adeno Associated Virus Capsid Protein Variant
  source 1..2208: mol_type = other DNA
atggctgccgatggttatcttccagattggctcgaggacaaccttagtgaaggaattcgcgagtggtgggctttgaaacctggagcccctcaacccaaggcaaatcaacaacatcaagacaacgctcgaggtcttgtgcttccgggttacaaataccttggacccggcaacggactcgacaagggggagccggtcaacgcagcagacgcggcggccctcgagcacgacaaggcctacgaccagcagctcaaggccggagacaacccgtacctcaagtacaaccacgccgacgccgagttccaggagcggctcaaagaagatacgtcttttgggggcaacctcgggcgagcagtcttccaggccaaaaagaggcttcttgaacctcttggtctggttgaggaagcggctaagacggctcctggaaagaagaggcctgtagagcagtctcctcaggaaccggactcctccgcgggtattggcaaatcgggtgcacagcccgctaaaaagagactcaatttcggtcagactggcgacacagagtcagtcccagaccctcaaccaatcggagtccctcccgcagccccctcaggtgtgggatctcttacaatggcttcaggtggtggcgcaccagtggcagacaataacgaaggtgccgatggagtgggtagttcctcgggaaattggcattgcgattcccaatggctgggggacagagtcatcaccaccagcacccgaacctgggccctgcccacctacaacaatcacctctacaagcaaatctccaacagcacatctggaggatcttcaaatgacaacgcctacttcggctacagcaccccctgggggtattttgacttcaacagattccactgccacttctcaccacgtgactggcagcgactcatcaacaacaactggggattccggcctaagcgactcaacttcaagctcttcaacattcaggtcaaagaggttacggacaacaatggagtcaagaccatcgccaataaccttaccagcacggtccaggtcttcacggactcagactatcagctcccgtacgtgctcgggtcggctcacgagggctgcctcccgccgttcccagcggacgttttcatgattcctcagtacgggtatctgacgcttaatgatggaagccaggccgtgggtcgttcgtccttttactgcctggaatatttcccgtcgcaaatgctaagaacgggtaacaacttccagttcagctacgagtttgagaacgtacctttccatagcagctacgctcacagccaaagcctggaccgactaatgaatccactcatcgaccaatacttgtactatctctcaaagactattaacggttctggacagggccaacaaacgctaaaattcagtgtggccggacccagcaacatggctgtccagggaagaaactacatacctggacccagctaccgacaacaacgtgtctcaaccactgtgacttttaacaacaacagcgaatttgcttggcctggagcttcttcttgggctctcaatggacgtaatagcttgatgaatcctggacctgctatggccagccacaaagaaggagaggaccgtttctttcctttgtctggatctttaatttttggcaaacaaggaactggaagagacaacgtggatgcggacaaagtcatgataaccaacgaagaagaaattaaaactactaacccggtagcaacggagtcctatggacaagtggccacaaaccaccagagtgcccgggcacaggcgcagaccggctgggttcaaaaccaaggaatacttccgggtatggtttggcaggacagagatgtgtacctgcaaggacccatttgggccaaaattcctcacacggacggcaactttcacccttctccgctgatgggagggtttggaatgaagcacccgcctcctcagatcctcatcaaaaacacacctgtacctgcggatcctccaacggccttcaacaagggcaagctgaactctttcatcacccagtattctactggccaagtcagcgtggagatcgagtgggagctgcagaaggaaaacagcaagcgctggaacccggagatccagtacacttccaactattacaagtctaataatgttgaatttgctgttaatactgaaggtgtatatagtgaaccccgccccattggcaccagatacctgactcgtaatctg

SEQ ID NO: 1086 - protein, 736 aa, synthetic construct
  REGION 1..736: note = Adeno Associated Virus Capsid Protein Variant
MAADGYLPDWLEDNLSEGIREWWALKPGAPQPKANQQHQDNARGLVLPGYKYLGPGNGLDKGEPVNAADAAALEHDKAYDQQLKAGDNPYLKYNHADAEFQERLKEDTSFGGNLGRAVFQAKKRLLEPLGLVEEAAKTAPGKKRPVEQSPQEPDSSAGIGKSGAQPAKKRLNFGQTGDTESVPDPQPIGVPPAAPSGVGSLTMASGGGAPVADNNEGADGVGSSSGNWHCDSQWLGDRVITTSTRTWALPTYNNHLYKQISNSTSGGSSNDNAYFGYSTPWGYFDFNRFHCHFSPRDWQRLINNNWGFRPKRLNFKLFNIQVKEVTDNNGVKTIANNLTSTVQVFTDSDYQLPYVLGSAHEGCLPPFPADVFMIPQYGYLTLNDGSQAVGRSSFYCLEYFPSQMLRTGNNFQFSYEFENVPFHSSYAHSQSLDRLMNPLIDQYLYYLSKTINGSGQGQQTLKFSVAGPSNMAVQGRNYIPGPSYRQQRVSTTVTFNNNSEFAWPGASSWALNGRNSLMNPGPAMASHKEGEDRFFPLSGSLIFGKQGTGRDNVDADKVMITNEEEIKTTNPVATESYGQVATNHQSARAQAQTGWVQNQGILPGMVWQDRDVYLQGPIWAKIPHTDGNFHPSPLMGGFGMKHPPPQILIKNTPVPADPPTAFNKGKLNSFITQYSTGQVSVEIEWELQKENSKRWNPEIQYTSNYYKSNNVEFAVNTEGVYSEPRPIGTRYLTRNL

SEQ ID NO: 1087 - DNA, 2208 bp, synthetic construct
  misc_feature 1..2208: note = Adeno Associated Virus Capsid Protein Variant
  source 1..2208: mol_type = other DNA
atggctgccgatggttatcttccagattggctcgaggacaaccttagtgaaggaattcgcgagtggtgggctttgaaacctggagcccctcaacccaaggcaaatcaacaacatcaagacaacgctcgaggtcttgtgcttccgggttacaaataccttggacccggcaacggactctacaagggggagccggtcaacgcagcagacgcggcggccctcgagcacgacaaggcctacgaccagcagctcaaggccggagacaacccgtacctcaagtacaaccacgccgacgccgagttccaggagcggctcaaagaagatacgtcttttgggggcaacctcgggcgagcagtcttccaggccaaaaagaggcttcttgaacctcttggtctggttgaggaagcggctaagacggctcctggaaagaagaggcctgtagagcagtctcctcaggaaccggactcctccgcgggtattggcaaatcgggtgcacagcccgctaaaaagagactcaatttcggtcagactggcgacacagagtcagtcccagaccctcaaccaatcggagaacctcccgcagccccctcaggtgtgggatctcttacaatggcttcaggtggtggcgcaccagtggcagacaataacgaaggtgccgatggagtgggtagttcctcgggaaattggcattgcgattcccaatggctgggggacagagtcatcaccaccagcacccgaacctgggccctgcccacctacaacaatcacctctacaagcaaatctccaacagcacatctggaggatcttcaaatgacaacgcctacttcggctacagcaccccctgggggtattttgacttcaacagattccactgccacttctcaccacgtgactggcagcgactcatcaacaacaactggggattccggcctaagcgactcaacttcaagctcttcaacattcaggtcaaagaggttacggacaacaatggagtcaagaccatcgccaataaccttaccagcacggtccaggtcttcacggactcagactatcagctcccgtacgtgctcgggtcggctcacgagggctgcctcccgccgttcccagcggacgttttcatgattcctcagtacgggtatctgacgcttaatgatggaagccaggccgtgggtcgttcgtccttttactgcctggaatatttcccgtcgcaaatgctaagaacgggtaacaacttccagttcagctacgagtttgagaacgtacctttccatagcagctacgctcacagccaaagcctggaccgactaatgaatccactcatcgaccaatacttgtactatctctcaaagactattaacggttctggacagggccaacaaacgctaaaattcagtgtggccggacccagcaacatggctgtccagggaagaaactacatacctggacccagctaccgacaacaacgtgtctcaaccactgtgacttttaacaacaacagcgaatttgcttggcctggagcttcttcttgggctctcaatggacgtaatagcttgatgaatcctggacctgctatggccagccacaaagaaggagaggaccgtttctttcctttgtctggatctttaatttttggcaaacaaggaactggaagagacaacgtggatgcggacaaagtcatgataaccaacgaagaagaaattaaaactactaacccggtagcaacggagtcctatggacaagtggccacaaaccaccagagtgcccgggcacaggcgcagaccggctgggttcaaaaccaaggaatacttccgggtatggtttggcaggacagagatgtgtacctgcaaggacccatttgggccaaaattcctcacacggacggcaactttcacccttctccgctgatgggagggtttggaatgaagcacccgcctcctcagatcctcatcaaaaacacacctgtacctgcggatcctccaacggccttcaacaagggcaagctgaactctttcatcacccagtattctactggccaagtcagcgtggagatcgagtgggagctgcagaaggaaaacagcaagcgctggaacccggagatccagtacacttccaactattacaagtctaataatgttgaatttgctgttaatactgaaggtgtatatagtgaaccccgccccattggcaccagatacctgactcgtaatctg

SEQ ID NO: 1088 - protein, 736 aa, synthetic construct
  REGION 1..736: note = Adeno Associated Virus Capsid Protein Variant
MAADGYLPDWLEDNLSEGIREWWALKPGAPQPKANQQHQDNARGLVLPGYKYLGPGNGLYKGEPVNAADAAALEHDKAYDQQLKAGDNPYLKYNHADAEFQERLKEDTSFGGNLGRAVFQAKKRLLEPLGLVEEAAKTAPGKKRPVEQSPQEPDSSAGIGKSGAQPAKKRLNFGQTGDTESVPDPQPIGEPPAAPSGVGSLTMASGGGAPVADNNEGADGVGSSSGNWHCDSQWLGDRVITTSTRTWALPTYNNHLYKQISNSTSGGSSNDNAYFGYSTPWGYFDFNRFHCHFSPRDWQRLINNNWGFRPKRLNFKLFNIQVKEVTDNNGVKTIANNLTSTVQVFTDSDYQLPYVLGSAHEGCLPPFPADVFMIPQYGYLTLNDGSQAVGRSSFYCLEYFPSQMLRTGNNFQFSYEFENVPFHSSYAHSQSLDRLMNPLIDQYLYYLSKTINGSGQGQQTLKFSVAGPSNMAVQGRNYIPGPSYRQQRVSTTVTFNNNSEFAWPGASSWALNGRNSLMNPGPAMASHKEGEDRFFPLSGSLIFGKQGTGRDNVDADKVMITNEEEIKTTNPVATESYGQVATNHQSARAQAQTGWVQNQGILPGMVWQDRDVYLQGPIWAKIPHTDGNFHPSPLMGGFGMKHPPPQILIKNTPVPADPPTAFNKGKLNSFITQYSTGQVSVEIEWELQKENSKRWNPEIQYTSNYYKSNNVEFAVNTEGVYSEPRPIGTRYLTRNL

SEQ ID NO: 1089 - DNA, 2208 bp, synthetic construct
  misc_feature 1..2208: note = Adeno Associated Virus Capsid Protein Variant
  source 1..2208: mol_type = other DNA
atggctgccgatggttatcttccagattggctcgaggacaaccttagtgaaggaattcgcgagtggtgggctttgaaacctggagcccctcaacccaaggcaaatcaacaacatcaagacaacgctcgaggtcttgtgcttccgggttacaaataccttggacccggcaacggactcgacaagggggagccggtcaacgcagcagacgcggcggccctcgagcacgacaaggcctacgaccagcagctcaaggccggagacaacccgtacctcaagtacaaccacgccgacgccgagttccaggagcggctcaaagaagatacgtcttttgggggcaacctcgggcgagcagtcttccaggccaaaaagaggcttcttgaacctcttggtctggttgaggaagcggctaagacggctcctggaaagaagaggcctgtagagcagtctcctcaggaaccggactcctccgcgggtattggcaaatcgggtgcacagcccgctaaaaagagactcaatttcggtcagactggcgacacagagtcagtcccagaccctcaaccaatcggagaacctcccgcagccccctcaggtgtgggatctcttacaatggcttcaggtggtggcgcaccagtggcagacaataacgaaggtgccgatggagtgggtagttcctcgggaaattggcattgcgattcccaatggctgggggacagagtcatcaccaccagcacccgaacctgggccctgcccacctacaacaatcacctctacaagcaaatctccaacagcacatctggaggatcttcaaatgacaacgcctacttcggctacagcaccccctgggggtattttgacttcaacagattccactgccacttctcaccacgtgactggcagcgactcatcaacaacaactggggattccggcctaagcgactcaacttcaagctcttcaacattcaggtcaaagaggttacggacaacaatggagtcaagaccatcgccaataaccttaccagcacggtccaggtcttcacggactcagactatcagctcccgtacgtgctcgggtcggctcacgagggctgcctcccgccgttcccagcggacgttttcatgattcctcagtacgggtatctgacgcttaatgatggaagccaggccgtgggtcgttcgtccttttactgcctggaatatttcccgtcgcaaatgctaagaacgggtaacaacttccagttcagctacgagtttgagaacgtacctttccatagcagctacgctcacagccaaagcctggaccgactaatgaatccactcatcgaccaatacttgtactatctctcaaagactattaacggttctggacagggccaacaaacgctaaaattcagtgtggccggacccagcaacatggctgtccagggaagaaactacatacctggacccagctaccgacaacaacgtgtctcaaccactgtgacttttaacaacaacagcgaatttgcttggcctggagcttcttcttgggctctcaatggacgtaatagcttgatgaatcctggacctgctatggccagccacaaagaaggagaggaccgtttctttcctttgtctggatctttaatttttggcaaacaaggaactggaagagacaacgtggatgcggacaaagtcatgataaccaacgaagaagaaattaaaactactaacccggtagcaacggagtcctatggacaagtggccacaaaccaccagagtgcccgggcacaggcgcagaccggctgggttcaaaaccaaggaatacttccgggtatggtttggcaggacagagatgtgtacctgcaaggacccatttgggccaaaattcctcacacggacggcaactttcacccttctccgctgatgggagggtttggaatgaagcacccgcctcctcagatcctcatcaaaaacacacctgtacctgcggatcctccaacggccttcaacaagggcaagctgaactctttcatcacccagtattctactggccaagtcagcgtggagatcgagtgggagctgcagaaggaaaacagcaagcgctggaacccggagatccagtacacttccaactattacaagtctaataatgttgaatttgctgttaatactgaaggtgtatatagtgaaccccgcattattggcaccagatacctgactcgtaatctg

SEQ ID NO: 1090 - protein, 736 aa, synthetic construct
  REGION 1..736: note = Adeno Associated Virus Capsid Protein Variant
MAADGYLPDWLEDNLSEGIREWWALKPGAPQPKANQQHQDNARGLVLPGYKYLGPGNGLDKGEPVNAADAAALEHDKAYDQQLKAGDNPYLKYNHADAEFQERLKEDTSFGGNLGRAVFQAKKRLLEPLGLVEEAAKTAPGKKRPVEQSPQEPDSSAGIGKSGAQPAKKRLNFGQTGDTESVPDPQPIGEPPAAPSGVGSLTMASGGGAPVADNNEGADGVGSSSGNWHCDSQWLGDRVITTSTRTWALPTYNNHLYKQISNSTSGGSSNDNAYFGYSTPWGYFDFNRFHCHFSPRDWQRLINNNWGFRPKRLNFKLFNIQVKEVTDNNGVKTIANNLTSTVQVFTDSDYQLPYVLGSAHEGCLPPFPADVFMIPQYGYLTLNDGSQAVGRSSFYCLEYFPSQMLRTGNNFQFSYEFENVPFHSSYAHSQSLDRLMNPLIDQYLYYLSKTINGSGQGQQTLKFSVAGPSNMAVQGRNYIPGPSYRQQRVSTTVTFNNNSEFAWPGASSWALNGRNSLMNPGPAMASHKEGEDRFFPLSGSLIFGKQGTGRDNVDADKVMITNEEEIKTTNPVATESYGQVATNHQSARAQAQTGWVQNQGILPGMVWQDRDVYLQGPIWAKIPHTDGNFHPSPLMGGFGMKHPPPQILIKNTPVPADPPTAFNKGKLNSFITQYSTGQVSVEIEWELQKENSKRWNPEIQYTSNYYKSNNVEFAVNTEGVYSEPRIIGTRYLTRNL

SEQ ID NO: 1091 - DNA, 2208 bp, synthetic construct
  misc_feature 1..2208: note = Adeno Associated Virus Capsid Protein Variant
  source 1..2208: mol_type = other DNA
atggctgccgatggttatcttccagattggctcgaggacaaccttagtgaaggaattcgcgagtggtgggctttgaaacctggagcccctcaacccaaggcaaatcaacaacatcaagacaacgctcgaggtcttgtgcttccgggttacaaataccttggacccggcaacggactcgacaagggggagccggtcaacgcagcagacgcggcggccctcgagcacgacaaggcctacgaccagcagctcaaggccggagacaacccgtacctcaagtacaaccacgccgacgccgagttccaggagcggctcaaagaagatacgtcttttgggggcaacctcgggcgagcagtcttccaggccaaaaagaggcttcttgaacctcttggtctggttgaggaagcggctaagacggctcctggaaagaagaggcctgtagagcagtctcctcaggaaccggactcctccgcgggtattggcaaatcgggtgcacagcccgctaaaaagagactcaatttcggtcagactggcgacacagagtcagtcccagaccctcaaccaatcggagaacctcccgcagccccctcaggtgtgggatctcttacaatggcttcaggtggtggcgcaccagtggcagacaataacgaaggtgccgatggagtgggtagttcctcgggaaattggcattgcgattcccaatggctgggggacagagtcatcaccaccagcacccgaacctgggccctgcccacctacaacaatcacctctacaagcaaatctccaacagcacatctggaggatcttcaaatgacaacgcctacttcggctacagcaccccctgggggtattttgacttcaacagattccactgccacttctcaccacgtgactggcagcgactcatcaacaacaactggggattccggcctaagcgactcaacttcaagctcttcaacattcaggtcaaagaggttacggacaataatggagtcaagaccatcgccaataaccttaccagcacggtccaggtcttcacggactcagactatcagctcccgtacgtgctcgggtcggctcacgagggctgcctcccgccgttcccagcggacgttttcatgattcctcagtacgggtatctgacgcttaatgatggaagccaggccgtgggtcgttcgtccttttactgcctggaatatttcccgtcgcaaatgctaagaacgggtaacaacttccagttcagctacgagtttgagaacgtacctttccatagcagctacgctcacagccaaagcctggaccgactaatgaatccactcatcgaccaatacttgtactatctctcaaagactattaacggttctggacagggccaacaaacgctaaaattcagtgtggccggacccagcaacatggctgtccagggaagaaactacatacctggacccagctaccgacaacaacgtgtctcaaccactgtgacttttaacaacaacagcgaatttgcttggcctggagcttcttcttgggctctcaatggacgtaatagcttgatgaatcctggacctgctatggccagccacaaagaaggagaggaccgtttctttcctttgtctggatctttaatttttggcaaacaaggaactggaagagacaacgtggatgcggacaaagtcatgataaccaacgaagaagaaattaaaactactaacccggtagcaacggagtcctatggacaagtggccacaaaccaccagagtgcccgggcacaggcgcagaccggctgggttcaaaaccaaggaatacttccgggtatggtttggcaggacagagatgtgtacctgcaaggacccatttgggccaaaattcctcacacggacggcaactttcacccttctccgctgatgggagggtttggaatgaagcacccgcctcctcagatcctcatcaaaaacacacctgtacctgcggatcctccaacggccttcaacaagggcaagctgaactctttcatcacccagtattctactggccaagtcagcgtggagatcgagtgggagctgcagaaggaaaacagcaagcgctggaacccggagatccagtacacttccaactattacaagtctaataatgttgaatttgctgttaatactgaaggtgtatatagtgaaccccgccccattggcaccagatacctgactcgtaatctg

SEQ ID NO: 1092 - protein, 736 aa, synthetic construct; identical to SEQ ID NO: 552
  REGION 1..736: note = Adeno Associated Virus Capsid Protein Variant

SEQ ID NO: 1093 - DNA, 2208 bp, synthetic construct
  misc_feature 1..2208: note = Adeno Associated Virus Capsid Protein Variant
  source 1..2208: mol_type = other DNA
atggctgccgatggttatcttccagattggctcgaggacaaccttagtgaaggaattcgcgagtggtgggctttgaaacctggagcccctcaacccaaggcaaatcaacaacatcaagacaacgctcgaggtcttgtgcttccgggttacaaataccttggacccggcaacggactcgacaagggggagccggtcaacgcagcagacgcggcggccctcgagcacgacaaggcctacgaccagcagctcaaggccggagacaacccgtacctcaagtacaaccacgccgacgccgagttccaggagcggctcaaagaagatacgtcttttgggggcaacctcgggcgagcagtcttccaggccaaaaagaggcttcttgaacctcttggtctggttgaggaagcggctaagacggctcctggaaagaagaggcctgtagagcagtctcctcaggaaccggactcctccgcgggtattggcaaatcgggtgcacagcccgctaaaaagagactcaatttcggtcagactggcgacacagagtcagtcccagaccctcaaccaatcggagaacctcccgcagccccctcaggtgtgggatctcttacaatggcttcaggtggtggcgcaccagtggcagacaataacgaaggtgccgatggagtgggtagttcctcgggaaattggcattgcgattcccaatggctgggggacagagtcatcaccaccagcacccgaacctgggccctgcccacctacaacaatcacctctacaagcaaatctccaacagcacatctggaggatcttcaaatgacaacgcctacttcggctacagcaccccctgggggtattttgacttcaacagattccactgccacttctcaccacgtgactggcagcgactcatcaacaacaactggggattccggcctaagcgactcaacttcaagctcttcaacattcaggtcaaagaggttacggacaacaatggagtcaagaccatcgccaataaccttaccagcacggtccaggtcttcacggactcagactatcagctcccgtacgtgctcgggtcggctcacgagggctgcctcccgccgttcccagcggacgttttcatgattcctcagtacgggtatctgacgcttaatgatggaagccaggccgtgggtcgttcgtccttttactgcctggaatatttcccgtcgcaaatgctaagaacgggtaacaacttccagttcagctacgagtttgagaacgtacctttccatagcagctacgctcacagccaaagcctggaccgactaatgaatccactcatcgaccaatacttgtactatctctcaaagactattaacggttctggacagggccaacaaacgctaaaattcagtgtggccggacccagcaacatggctgtccagggaagaaactacatacctggacccagctaccgacaacaacgtgtctcaaccactgtgacttttaacaacaacagcgaatttgcttggcctggagcttcttcttgggctctcaatggacgtaatagcttgatgaatcctggacctgctatggccagccacaaagaaggagaggaccgtttctttcctttgtctggatctttaatttttggcaaacaaggaactggaagagacaacgtggatgcggacaaagtcatgataaccaacgaagaagaaattaaaactactaacccggtagcaacggagtcctatggacaagtggccacaaaccaccagagtgcccgggcacaggcgcagaccggctgggttcaaaaccaaggaatacttccgggtatggtttggcaggacagagatgtgtacctgcaaggacccatttgggccaaaattcctcacacggacggcaactttcacccttctccgctgatgggagggtttggaatgaagcacccgcctcctcagatcctcatcaaaaacacacctgtacctgcggatcctccaacggccttcaacaagggcaagctgaactctttcatcacccagtattctactggccaagtcagcgtggagatcgagtgggagctgcagaaggaaaacagcaagcgctggaacccggagatccagtacacttccaactattacaagtctaataatgttgaatttgctgttaatactgaaggtttttatagtgaaccccgccccattggcaccagatacctgactcgtaatctg

SEQ ID NO: 1094 - protein, 736 aa, synthetic construct
  REGION 1..736: note = Adeno Associated Virus Capsid Protein Variant
MAADGYLPDWLEDNLSEGIREWWALKPGAPQPKANQQHQDNARGLVLPGYKYLGPGNGLDKGEPVNAADAAALEHDKAYDQQLKAGDNPYLKYNHADAEFQERLKEDTSFGGNLGRAVFQAKKRLLEPLGLVEEAAKTAPGKKRPVEQSPQEPDSSAGIGKSGAQPAKKRLNFGQTGDTESVPDPQPIGEPPAAPSGVGSLTMASGGGAPVADNNEGADGVGSSSGNWHCDSQWLGDRVITTSTRTWALPTYNNHLYKQISNSTSGGSSNDNAYFGYSTPWGYFDFNRFHCHFSPRDWQRLINNNWGFRPKRLNFKLFNIQVKEVTDNNGVKTIANNLTSTVQVFTDSDYQLPYVLGSAHEGCLPPFPADVFMIPQYGYLTLNDGSQAVGRSSFYCLEYFPSQMLRTGNNFQFSYEFENVPFHSSYAHSQSLDRLMNPLIDQYLYYLSKTINGSGQGQQTLKFSVAGPSNMAVQGRNYIPGPSYRQQRVSTTVTFNNNSEFAWPGASSWALNGRNSLMNPGPAMASHKEGEDRFFPLSGSLIFGKQGTGRDNVDADKVMITNEEEIKTTNPVATESYGQVATNHQSARAQAQTGWVQNQGILPGMVWQDRDVYLQGPIWAKIPHTDGNFHPSPLMGGFGMKHPPPQILIKNTPVPADPPTAFNKGKLNSFITQYSTGQVSVEIEWELQKENSKRWNPEIQYTSNYYKSNNVEFAVNTEGFYSEPRPIGTRYLTRNL

SEQ ID NO: 1095 - DNA, 2208 bp, synthetic construct
  misc_feature 1..2208: note = Adeno Associated Virus Capsid Protein Variant
  source 1..2208: mol_type = other DNA
atggctgccgatggttatcttccagattggctcgaggacaaccttagtgaaggaattcgcgagtggtgggctttgaaacctggagcccctcaacccaaggcaaatcaacaacatcaagacaacgctcgaggtcttgtgcttccgggttacaaataccttggacccggcaacggactcgacaagggggagccggtcaacgcagcagacgcggcggccctcgagcacgacaaggcctacgaccagcagctcaaggccggagacaacccgtacctcaagtacaaccacgccgacgccgagttccaggagcggctcaaagaagatacgtcttttgggggcaacctcgggcgagcagtcttccaggccaaaaagaggcttcttgaacctcttggtctggttgaggaagcggctaagacggctcctggaaagaagaggcctgtagagcagtctcctcaggaaccggactcctccgcgggtattggcaaatcgggtgcacagcccgctaaaaagagactcaatttcggtcagactggcgacacagagtcagtcccagaccctcaaccaatcggagaacctcccgcagccccctcaggtgtgggatctcttacaatggcttcaggtggtggcgcaccagtggcagacaataacgaaggtgccgatggagtgggtagttcctcgggaaattggcattgcgattcccaatggctgggggacagagtcatcaccaccagcacccgaacctgggccctgcccacctacaacaatcacctctacaagcaaatctccaacagcacatctggaggatcttcaaatgacaacgcctacttcggctacagcaccccctgggggtattttgacttcaacagattccactgccacttctcaccacgtgactggcagcgactcatcaacaacaactggggattccggcctaagcgactcaacttcaagctcttcaacattcaggtcaaagaggttacggacaacgggggagtcaagaccatcgccaataaccttaccagcacggtccaggtcttcacggactcagactatcagctcccgtacgtgctcgggtcggctcacgagggctgcctcccgccgttcccagcggacgttttcatgattcctcagtacgggtatctgacgcttaatgatggaagccaggccgtgggtcgttcgtccttttactgcctggaatatttcccgtcgcaaatgctaagaacgggtaacaacttccagttcagctacgagtttgagaacgtacctttccatagcagctacgctcacagccaaagcctggaccgactaatgaatccactcatcgaccaatacttgtactatctctcaaagactattaacggttctggacagggccaacaaacgctaaaattcagtgtggccggacccagcaacatggctgtccagggaagaaactacatacctggacccagctaccgacaacaacgtgtctcaaccactgtgacttttaacaacaacagcgaatttgcttggcctggagcttcttcttgggctctcaatggacgtaatagcttgatgaatcctggacctgctatggccagccacaaagaaggagaggaccgtttctttcctttgtctggatctttaatttttggcaaacaaggaactggaagagacaacgtggatgcggacaaagtcatgataaccaacgaagaagaaattaaaactactaacccggtagcaacggagtcctatggacaagtggccacaaaccaccagagtgcccgggcacaggcgcagaccggctgggttcaaaaccaaggaatacttccgggtatggtttggcaggacagagatgtgtacctgcaaggacccatttgggccaaaattcctcacacggacggcaactttcacccttctccgctgatgggagggtttggaatgaagcacccgcctcctcagatcctcatcaaaaacacacctgtacctgcggatcctccaacggccttcaacaagggcaagctgaactctttcatcacccagtattctactggccaagtcagcgtggagatcgagtgggagctgcagaaggaaaacagcaagcgctggaacccggagatccagtacacttccaactattacaagtctaataatgttgaatttgctgttaatactgaaggtgtatatagtgaaccccgccccattggcaccagatacctgactcgtaatctg

SEQ ID NO: 1096 - protein, 736 aa, synthetic construct
  REGION 1..736: note = Adeno Associated Virus Capsid Protein Variant
MAADGYLPDWLEDNLSEGIREWWALKPGAPQPKANQQHQDNARGLVLPGYKYLGPGNGLDKGEPVNAADAAALEHDKAYDQQLKAGDNPYLKYNHADAEFQERLKEDTSFGGNLGRAVFQAKKRLLEPLGLVEEAAKTAPGKKRPVEQSPQEPDSSAGIGKSGAQPAKKRLNFGQTGDTESVPDPQPIGEPPAAPSGVGSLTMASGGGAPVADNNEGADGVGSSSGNWHCDSQWLGDRVITTSTRTWALPTYNNHLYKQISNSTSGGSSNDNAYFGYSTPWGYFDFNRFHCHFSPRDWQRLINNNWGFRPKRLNFKLFNIQVKEVTDNGGVKTIANNLTSTVQVFTDSDYQLPYVLGSAHEGCLPPFPADVFMIPQYGYLTLNDGSQAVGRSSFYCLEYFPSQMLRTGNNFQFSYEFENVPFHSSYAHSQSLDRLMNPLIDQYLYYLSKTINGSGQGQQTLKFSVAGPSNMAVQGRNYIPGPSYRQQRVSTTVTFNNNSEFAWPGASSWALNGRNSLMNPGPAMASHKEGEDRFFPLSGSLIFGKQGTGRDNVDADKVMITNEEEIKTTNPVATESYGQVATNHQSARAQAQTGWVQNQGILPGMVWQDRDVYLQGPIWAKIPHTDGNFHPSPLMGGFGMKHPPPQILIKNTPVPADPPTAFNKGKLNSFITQYSTGQVSVEIEWELQKENSKRWNPEIQYTSNYYKSNNVEFAVNTEGVYSEPRPIGTRYLTRNL

SEQ ID NO: 1097 - DNA, 2208 bp, synthetic construct
  misc_feature 1..2208: note = Adeno Associated Virus Capsid Protein Variant
  source 1..2208: mol_type = other DNA
atggctgccgatggttatcttccagattggctcgaggacaaccttagtgaaggaattcgcgagtggtgggctttgaaacctggagcccctcaacccaaggcaaatcaacaacatcaagacaacgctcgaggtcttgtgcttccgggttacaaataccttggacccggcaacggactcgacaagggggagccggtcaacgcagcagacgcggcggccctcgagcacgacaaggcctacgaccagcagctcaaggccggagacaacccgtacctcaagtacaaccacgccgacgccgagttccaggagcggctcaaagaagatacgtcttttgggggcaacctcgggcgagcagtcttccaggccaaaaagaggcttcttgaacctcttggtctggttgaggaagcggctaagacggctcctggaaagaagaggcctgtagagcagtctcctcaggaaccggactcctccgcgggtattggcaaatcgggtgcacagcccgctaaaaagagactcaatttcggtcagactggcgacacagagtcagtcccagaccctcaaccaatcggagaacctcccgcagccccctcaggtgtgggatctcttacaatggcttcaggtggtggcgcaccagtggcagacaataacgaaggtgccgatggagtgggtagttcctcgggaaattggcattgcgattcccaatggctgggggacagagtcatcaccaccagcacccgaacctgggccctgcccacctacaacaatcacctctacaagcaaatctccaacagcacatctggaggatcttcaaatgacaacgcctacttcggctacagcaccccctgggggtattttgacttcaacagattccactgccacttctcaccacgtgactggcagcgactcatcaacaacaactggggattccggcctaagcgactcaacttcaagctcttcaacattcaggtcaaagaggttacggacaacaatggagtcaagaccatcgccaataaccttaccagcacggtccaggtcttcacggactcagactatcagctcccgtacgtgctcgggtcggctcacgagggctgcctcccgccgttcccagcggacgttttcatgattcctcagtacgggtatctgacgcttaatgatggaagccaggccgtgggtcgttcgtccttttactgcctggaatatttcccgtcgcaaatgctaagaacgggtaacaacttccagttcagctacgagtttgagaacgtacctttccatagcagctacgctcacagccaaagcctggaccgactaatgaatccactcatcgaccaatacttgtactatctctcaaagactgtcgacggttctggacagggccaacaaacgctaaaattcagtgtggccggacccagcaacatggctgtccagggaagaaactacatacctggacccagctaccgacaacaacgtgtctcaaccactgtgacttttaacaacaacagcgaatttgcttggcctggagcttcttcttgggctctcaatggacgtaatagcttgatgaatcctggacctgctatggccagccacaaagaaggagaggaccgtttctttcctttgtctggatctttaatttttggcaaacaaggaactggaagagacaacgtggatgcggacaaagtcatgataaccaacgaagaagaaattaaaactactaacccggtagcaacggagtcctatggacaagtggccacaaaccaccagagtgcccgggcacaggcgcagaccggctgggttcaaaaccaaggaatacttccgggtatggtttggcaggacagagatgtgtacctgcaaggacccatttgggccaaaattcctcacacggacggcaactttcacccttctccgctgatgggagggtttggaatgaagcacccgcctcctcagatcctcatcaaaaacacacctgtacctgcggatcctccaacggccttcaacaagggcaagctgaactctttcatcacccagtattctactggccaagtcagcgtggagatcgagtgggagctgcagaaggaaaacagcaagcgctggaacccggagatccagtacacttccaactattacaagtctaataatgttgaatttgctgttaatactgaaggtgtatatagtgaaccccgccccattggcaccagatacctgactcgtaatctg

SEQ ID NO: 1098 - protein, 736 aa, synthetic construct
  REGION 1..736: note = Adeno Associated Virus Capsid Protein Variant
MAADGYLPDWLEDNLSEGIREWWALKPGAPQPKANQQHQDNARGLVLPGYKYLGPGNGLDKGEPVNAADAAALEHDKAYDQQLKAGDNPYLKYNHADAEFQERLKEDTSFGGNLGRAVFQAKKRLLEPLGLVEEAAKTAPGKKRPVEQSPQEPDSSAGIGKSGAQPAKKRLNFGQTGDTESVPDPQPIGEPPAAPSGVGSLTMASGGGAPVADNNEGADGVGSSSGNWHCDSQWLGDRVITTSTRTWALPTYNNHLYKQISNSTSGGSSNDNAYFGYSTPWGYFDFNRFHCHFSPRDWQRLINNNWGFRPKRLNFKLFNIQVKEVTDNNGVKTIANNLTSTVQVFTDSDYQLPYVLGSAHEGCLPPFPADVFMIPQYGYLTLNDGSQAVGRSSFYCLEYFPSQMLRTGNNFQFSYEFENVPFHSSYAHSQSLDRLMNPLIDQYLYYLSKTVDGSGQGQQTLKFSVAGPSNMAVQGRNYIPGPSYRQQRVSTTVTFNNNSEFAWPGASSWALNGRNSLMNPGPAMASHKEGEDRFFPLSGSLIFGKQGTGRDNVDADKVMITNEEEIKTTNPVATESYGQVATNHQSARAQAQTGWVQNQGILPGMVWQDRDVYLQGPIWAKIPHTDGNFHPSPLMGGFGMKHPPPQILIKNTPVPADPPTAFNKGKLNSFITQYSTGQVSVEIEWELQKENSKRWNPEIQYTSNYYKSNNVEFAVNTEGVYSEPRPIGTRYLTRNL

SEQ ID NO: 1099 - DNA, 2208 bp, synthetic construct
  misc_feature 1..2208: note = Adeno Associated Virus Capsid Protein Variant
  source 1..2208: mol_type = other DNA
atggctgccgatggttatcttccagattggctcgaggacaaccttagtgaaggaattcgcgagtggtgggctttgaaacctggagcccctcaacccaaggcaaatcaacaacatcaagacaacgctcgaggtcttgtgcttccgggttacaaataccttggacccggcaacggactcgacaagggggagccggtcaacgcagcagacgcggcggccctcgagcacgacaaggcctacgaccagcagctcaaggccggagacaacccgtacctcaagtacaaccacgccgacgccgagttccaggagcggctcaaagaagatacgtcttttgggggcaacctcgggcgagcagtcttccaggccaaaaagaggcttcttgaacctcttggtctggttgaggaagcggctaagacggctcctggaaagaagaggcctgtagagcagtctcctcaggaaccggactcctccgcgggtattggcaaatcgggtgcacagcccgctaaaaagagactcaatttcggtcagactggcgacacagagtcagtcccagaccctcaaccaatcggagaacctcccgcagccccctcaggtgtgggatctcttacaatggcttcaggtggtggcgcaccagtggcagacaataacgaaggtgccgatggagtgggtagttcctcgggaaattggcattgcgattcccaatggctgggggacagagtcatcaccaccagcacccgaacctgggccctgcccacctacaacaatcacctctacaagcaaatctccaacagcacatctggaggatcttcaaatgacaacgcctacttcggctacagcaccccctgggggtattttgacttcaacagattccactgccacttctcaccacgtgactggcagcgactcatcaacaacaactggggattccggcctaagcgactcaacttcaagctcttcaacattcaggtcaaagaggttacggacaacaatggagtcaagaccatcgccaataaccttaccagcacggtccaggtcttcacggactcagactatcagctcccgtacgtgctcgggtcggctcacgagggctgcctcccgccgttcccagcggacgttttcatgattcctcagtacgggtatctgacgcttaatgatggaagccaggccgtgggtcgttcgtccttttactgcctggaatatttcccgtcgcaaatgctaagaacgggtaacaacttccagttcagctacgagtttgagaacgtacctttccatagcagctacgctcacagccaaagcctggaccgactaatgaatccactcatcgaccaatacttgtactatctctcaaagactaacaacggttctggacagggccaacaaacgctaaaattcagtgtggccggacccagcaacatggctgtccagggaagaaactacatacctggacccagctaccgacaacaacgtgtctcaaccactgtgacttttaacaacaacagcgaatttgcttggcctggagcttcttcttgggctctcaatggacgtaatagcttgatgaatcctggacctgctatggccagccacaaagaaggagaggaccgtttctttcctttgtctggatctttaatttttggcaaacaaggaactggaagagacaacgtggatgcggacaaagtcatgataaccaacgaagaagaaattaaaactactaacccggtagcaacggagtcctatggacaagtggccacaaaccaccagagtgcccgggcacaggcgcagaccggctgggttcaaaaccaaggaatacttccgggtatggtttggcaggacagagatgtgtacctgcaaggacccatttgggccaaaattcctcacacggacggcaactttcacccttctccgctgatgggagggtttggaatgaagcacccgcctcctcagatcctcatcaaaaacacacctgtacctgcggatcctccaacggccttcaacaagggcaagctgaactctttcatcacccagtattctactggccaagtcagcgtggagatcgagtgggagctgcagaaggaaaacagcaagcgctggaacccggagatccagtacacttccaactattacaagtctaataatgttgaatttgctgttaatactgaaggtgtatatagtgaaccccgccccattggcaccagatacctgactcgtaatctg

SEQ ID NO: 1100 - protein, 736 aa, synthetic construct
  REGION 1..736: note = Adeno Associated Virus Capsid Protein Variant
MAADGYLPDWLEDNLSEGIREWWALKPGAPQPKANQQHQDNARGLVLPGYKYLGPGNGLDKGEPVNAADAAALEHDKAYDQQLKAGDNPYLKYNHADAEFQERLKEDTSFGGNLGRAVFQAKKRLLEPLGLVEEAAKTAPGKKRPVEQSPQEPDSSAGIGKSGAQPAKKRLNFGQTGDTESVPDPQPIGEPPAAPSGVGSLTMASGGGAPVADNNEGADGVGSSSGNWHCDSQWLGDRVITTSTRTWALPTYNNHLYKQISNSTSGGSSNDNAYFGYSTPWGYFDFNRFHCHFSPRDWQRLINNNWGFRPKRLNFKLFNIQVKEVTDNNGVKTIANNLTSTVQVFTDSDYQLPYVLGSAHEGCLPPFPADVFMIPQYGYLTLNDGSQAVGRSSFYCLEYFPSQMLRTGNNFQFSYEFENVPFHSSYAHSQSLDRLMNPLIDQYLYYLSKTNNGSGQGQQTLKFSVAGPSNMAVQGRNYIPGPSYRQQRVSTTVTFNNNSEFAWPGASSWALNGRNSLMNPGPAMASHKEGEDRFFPLSGSLIFGKQGTGRDNVDADKVMITNEEEIKTTNPVATESYGQVATNHQSARAQAQTGWVQNQGILPGMVWQDRDVYLQGPIWAKIPHTDGNFHPSPLMGGFGMKHPPPQILIKNTPVPADPPTAFNKGKLNSFITQYSTGQVSVEIEWELQKENSKRWNPEIQYTSNYYKSNNVEFAVNTEGVYSEPRPIGTRYLTRNL

SEQ ID NO: 1101 - DNA, 2208 bp, synthetic construct
  misc_feature 1..2208: note = Adeno Associated Virus Capsid Protein Variant
  source 1..2208: mol_type = other DNA
atggctgccgatggttatcttccagattggctcgaggacaaccttagtgaaggaattcgcgagtggtgggctttgaaacctggagcccctcaacccaaggcaaatcaacaacatcaagacaacgctcgaggtcttgtgcttccgggttacaaataccttggacccggcaacggactcgacaagggggagccggtcaacgcagcagacgcggcggccctcgagcacgacaaggcctacgaccagcagctcaaggccggagacaacccgtacctcaagtacaaccacgccgacgccgagttccaggagcggctcaaagaagatacgtcttttgggggcaacctcgggcgagcagtcttccaggccaaaaagaggcttcttgaacctcttggtctggttgaggaagcggctaagacggctcctggaaagaagaggcctgtagagcagtctcctcaggaaccggactcctccgcgggtattggcaaatcgggtgcacagcccgctaaaaagagactcaatttcggtcagactggcgacacagagtcagtcccagaccctcaaccaatcggagaacctcccgcagccccctcaggtgtgggatctcttacaatggcttcaggtggtggcgcaccagtggcagacaataacgaaggtgccgatggagtgggtagttcctcgggaaattggcattgcgattcccaatggctgggggacagagtcatcaccaccagcacccgaacctgggccctgcccacctacaacaatcacctctacaagcaaatctccaacagcacatctggaggatcttcaaatgacaacgcctacttcggctacagcaccccctgggggtattttgacttcaacagattccactgccacttctcaccacgtgactggcagcgactcatcaacaacaactggggattccggcctaagcgactcaacttcaagctcttcaacattcaggtcaaagaggttacggacaacaatggagtcaagaccatcgccaataaccttaccagcacggtccaggtcttcacggactcagactatcagctcccgtacgtgctcgggtcggctcacgagggctgcctcccgccgttcccagcggacgttttcatgattcctcagtacgggtatctgacgcttaatgatggaagccaggccgtgggtcgttcgtccttttactgcctggaatatttcccgtcgcaaatgctaagaacgggtaacaacttccagttcagctacgagtttgagaacgtacctttccatagcagctacgctcacagccaaagcctggaccgactaatgaatccactcatcgaccaatacttgtactatctctcaaagactattaacggttctggacagggccaacaaacgctaaaattcagtgtggccggacccagcaacatggctgtccagggaagaaactacatacctggacccagctaccgacaacaacgtgtctcaaccactgtgacttttaacaacaacagcgaatttgcttggcctggagcttcttcttggatactcaatggacgtaatagcttgatgaatcctggacctgctatggccagccacaaagaaggagaggaccgtttctttcctttgtctggatctttaatttttggcaaacaaggaactggaagagacaacgtggatgcggacaaagtcatgataaccaacgaagaagaaattaaaactactaacccggtagcaacggagtcctatggacaagtggccacaaaccaccagagtgcccgggcacaggcgcagaccggctgggttcaaaaccaaggaatacttccgggtatggtttggcaggacagagatgtgtacctgcaaggacccatttgggccaaaattcctcacacggacggcaactttcacccttctccgctgatgggagggtttggaatgaagcacccgcctcctcagatcctcatcaaaaacacacctgtacctgcggatcctccaacggccttcaacaagggcaagctgaactctttcatcacccagtattctactggccaagtcagcgtggagatcgagtgggagctgcagaaggaaaacagcaagcgctggaacccggagatccagtacacttccaactattacaagtctaataatgttgaatttgctgttaatactgaaggtgtatatagtgaaccccgccccattggcaccagatacctgactcgtaatctg

SEQ ID NO: 1102 - protein, 736 aa, synthetic construct
  REGION 1..736: note = Adeno Associated Virus Capsid Protein Variant
MAADGYLPDWLEDNLSEGIREWWALKPGAPQPKANQQHQDNARGLVLPGYKYLGPGNGLDKGEPVNAADAAALEHDKAYDQQLKAGDNPYLKYNHADAEFQERLKEDTSFGGNLGRAVFQAKKRLLEPLGLVEEAAKTAPGKKRPVEQSPQEPDSSAGIGKSGAQPAKKRLNFGQTGDTESVPDPQPIGEPPAAPSGVGSLTMASGGGAPVADNNEGADGVGSSSGNWHCDSQWLGDRVITTSTRTWALPTYNNHLYKQISNSTSGGSSNDNAYFGYSTPWGYFDFNRFHCHFSPRDWQRLINNNWGFRPKRLNFKLFNIQVKEVTDNNGVKTIANNLTSTVQVFTDSDYQLPYVLGSAHEGCLPPFPADVFMIPQYGYLTLNDGSQAVGRSSFYCLEYFPSQMLRTGNNFQFSYEFENVPFHSSYAHSQSLDRLMNPLIDQYLYYLSKTINGSGQGQQTLKFSVAGPSNMAVQGRNYIPGPSYRQQRVSTTVTFNNNSEFAWPGASSWILNGRNSLMNPGPAMASHKEGEDRFFPLSGSLIFGKQGTGRDNVDADKVMITNEEEIKTTNPVATESYGQVATNHQSARAQAQTGWVQNQGILPGMVWQDRDVYLQGPIWAKIPHTDGNFHPSPLMGGFGMKHPPPQILIKNTPVPADPPTAFNKGKLNSFITQYSTGQVSVEIEWELQKENSKRWNPEIQYTSNYYKSNNVEFAVNTEGVYSEPRPIGTRYLTRNL

SEQ ID NO: 1103 - DNA, 2208 bp, synthetic construct
  misc_feature 1..2208: note = Adeno Associated Virus Capsid Protein Variant
  source 1..2208: mol_type = other DNA
atggctgccgatggttatcttccagattggctcgaggacaaccttagtgaaggaattcgcgagtggtgggctttgaaacctggagcccctcaacccaaggcaaatcaacaacatcaagacaacgctcgaggtcttgtgcttccgggttacaaataccttggacccggcaacggactcgacaagggggagccggtcaacgcagcagacgcggcggccctcgagcacgacaaggcctacgaccagcagctcaaggccggagacaacccgtacctcaagtacaaccacgccgacgccgagttccaggagcggctcaaagaagatacgtcttttgggggcaacctcgggcgagcagtcttccaggccaaaaagaggcttcttgaacctcttggtctggttgaggaagcggctaagacggctcctggaaagaagaggcctgtagagcagtctcctcaggaaccggactcctccgcgggtattggcaaatcgggtgcacagcccgctaaaaagagactcaatttcggtcagactggcgacacagagtcagtcccagaccctcaaccaatcggagaacctcccgcagccccctcaggtgtgggatctcttacaatggcttcaggtggtggcgcaccagtggcagacaataacgaaggtgccgatggagtgggtagttcctcgggaaattggcattgcgattcccaatggctgggggacagagtcatcaccaccagcacccgaacctgggccctgcccacctacaacaatcacctctacaagcaaatctccaacagcacatctggaggatcttcaaatgacaacgcctacttcggctacagcaccccctgggggtattttgacttcaacagattccactgccacttctcaccacgtgactggcagcgactcatcaacaacaactggggattccggcctaagcgactcaacttcaagctcttcaacattcaggtcaaagaggttacggacaacaatggagtcaagaccatcgccaataaccttaccagcacggtccaggtcttcacggactcagactatcagctcccgtacgtgctcgggtcggctcacgagggctgcctcccgccgttcccagcggacgttttcatgattcctcagtacgggtatctgacgcttaatgatggaagccaggccgtgggtcgttcgtccttttactgcctggaatatttcccgtcgcaaatgctaagaacgggtaacaacttccagttcagctacgagtttgagaacgtacctttccatagcagctacgctcacagccaaagcctggaccgactaatgaatccactcatcgaccaatacttgtactatctctcaaagactattaacggttctggacagggccaacaaacgctaaaattcagtgtggccggacccagcaacatggctgtccagggaagaaactacatacctggacccagctaccgacaacaacgtgtctcaaccactgtgacttttgacaacaacagcgaatttgcttggcctggagcttcttcttgggctctcaatggacgtaatagcttgatgaatcctggacctgctatggccagccacaaagaaggagaggaccgtttctttcctttgtctggatctttaatttttggcaaacaaggaactggaagagacaacgtggatgcggacaaagtcatgataaccaacgaagaagaaattaaaactactaacccggtagcaacggagtcctatggacaagtggccacaaaccaccagagtgcccgggcacaggcgcagaccggctgggttcaaaaccaaggaatacttccgggtatggtttggcaggacagagatgtgtacctgcaaggacccatttgggccaaaattcctcacacggacggcaactttcacccttctccgctgatgggagggtttggaatgaagcacccgcctcctcagatcctcatcaaaaacacacctgtacctgcggatcctccaacggccttcaacaagggcaagctgaactctttcatcacccagtattctactggccaagtcagcgtggagatcgagtgggagctgcagaaggaaaacagcaagcgctggaacccggagatccagtacacatccaactattacaagtctaataatgttgaatttgctgttaatactgaaggtgtatatagtgaaccccgccccattggcaccagatacctgactcgtaatctg

SEQ ID NO: 1104 - protein, 736 aa, synthetic construct
  REGION 1..736: note = Adeno Associated Virus Capsid Protein Variant
MAADGYLPDWLEDNLSEGIREWWALKPGAPQPKANQQHQDNARGLVLPGYKYLGPGNGLDKGEPVNAADAAALEHDKAYDQQLKAGDNPYLKYNHADAEFQERLKEDTSFGGNLGRAVFQAKKRLLEPLGLVEEAAKTAPGKKRPVEQSPQEPDSSAGIGKSGAQPAKKRLNFGQTGDTESVPDPQPIGEPPAAPSGVGSLTMASGGGAPVADNNEGADGVGSSSGNWHCDSQWLGDRVITTSTRTWALPTYNNHLYKQISNSTSGGSSNDNAYFGYSTPWGYFDFNRFHCHFSPRDWQRLINNNWGFRPKRLNFKLFNIQVKEVTDNNGVKTIANNLTSTVQVFTDSDYQLPYVLGSAHEGCLPPFPADVFMIPQYGYLTLNDGSQAVGRSSFYCLEYFPSQMLRTGNNFQFSYEFENVPFHSSYAHSQSLDRLMNPLIDQYLYYLSKTINGSGQGQQTLKFSVAGPSNMAVQGRNYIPGPSYRQQRVSTTVTFDNNSEFAWPGASSWALNGRNSLMNPGPAMASHKEGEDRFFPLSGSLIFGKQGTGRDNVDADKVMITNEEEIKTTNPVATESYGQVATNHQSARAQAQTGWVQNQGILPGMVWQDRDVYLQGPIWAKIPHTDGNFHPSPLMGGFGMKHPPPQILIKNTPVPADPPTAFNKGKLNSFITQYSTGQVSVEIEWELQKENSKRWNPEIQYTSNYYKSNNVEFAVNTEGVYSEPRPIGTRYLTRNL

SEQ ID NO: 1105 - DNA, 2208 bp, synthetic construct
  misc_feature 1..2208: note = Adeno Associated Virus Capsid Protein Variant
  source 1..2208: mol_type = other DNA
atggctgccgatggttatcttccagattggctcgaggacaaccttagtgaaggaattcgcgagtggtgggctttgaaacctggagcccctcaacccaaggcaaatcaacaacatcaagacaacgctcgaggtcttgtgcttccgggttacaaataccttggacccggcaacggactcgacaagggggagccggtcaacgcagcagacgcggcggccctcgagcacgacaaggcctacgaccagcagctcaaggccggagacaacccgtacctcaagtacaaccacgccgacgccgagttccaggagcggctcaaagaagatacgtcttttgggggcaacctcgggcgagcagtcttccaggccaaaaagaggcttcttgaacctcttggtctggttgaggaagcggctaagacggctcctggaaagaagaggcctgtagagcagtctcctcaggaaccggactcctccgcgggtattggcaaatcgggtgcacagcccgctaaaaagagactcaatttcggtcagactggcgacacagagtcagtcccagaccctcaaccaatcggagaacctcccgcagccccctcaggtgtgggatctcttacaatggcttcaggtggtggcgcaccagtggcagacaataacgaaggtgccgatggagtgggtagttcctcgggaaattggcattgcgattcccaatggctgggggacagagtcatcaccaccagcacccgaacctgggccctgcccacctacaacaatcacctctacaagcaaatctccaacagcacatctggaggatcttcaaatgacaacgcctacttcggctacagcaccccctgggggtattttgacttcaacagattccactgccacttctcaccacgtgactggcagcgactcatcaacaacaactggggattccggcctaagcgactcaacttcaagctcttcaacattcaggtcaaagaggttacggacaacaatggagtcaagaccatcgccaataaccttaccagcacggtccaggtcttcacggactcagactatcagctcccgtacgtgctcgggtcggctcacgagggctgcctcccgccgttcccagcggacgttttcatgattcctcagtacgggtatctgacgcttaatgatggaagccaggccttcggtcgttcgtccttttactgcctggaatatttcccgtcgcaaatgctaagaacgggtaacaacttccagttcagctacgagtttgagaacgtacctttccatagcagctacgctcacagccaaagcctggaccgactaatgaatccactcatcgaccaatacttgtactatctctcaaagactattaacggttctggacagggccaacaaacgctaaaattcagtgtggccggacccagcaacatggctgtccagggaagaaactacatacctggacccagctaccgacaacaacgtgtctcaaccactgtgacttttaacaacaacagcgaatttgcttggcctggagcttcttcttgggctctcaatggacgtaatagcttgatgaatcctggacctgctatggccagccacaaagaaggagaggaccgtttctttcctttgtctggatctttaatttttggcaaacaaggaactggaagagacaacgtggatgcggacaaagtcatgataaccaacgaagaagaaattaaaactactaacccggtagcaacggagtcctatggacaagtggccacaaaccaccagagtgcccgggcacaggcgcagaccggctgggttcaaaaccaaggaatacttccgggtatggtttggcaggacagagatgtgtacctgcaaggacccatttgggccaaaattcctcacacggacggcaactttcacccttctccgctgatgggagggtttggaatgaagcacccgcctcctcagatcctcatcaaaaacacacctgtacctgcggatcctccaacggccttcaacaagggcaagctgaactctttcatcacccagtattctactggccaagtcagcgtggagatcgagtgggagctgcagaaggaaaacagcaagcgctggaacccggagatccagtacacttccaactattacaagtctaataatgttgaatttgctgttaatactgaaggtgtatatagtgaaccccgccccattggcaccagatacctgactcgtaatctg

SEQ ID NO: 1106 - protein, 736 aa, synthetic construct
  REGION 1..736: note = Adeno Associated Virus Capsid Protein Variant
MAADGYLPDWLEDNLSEGIREWWALKPGAPQPKANQQHQDNARGLVLPGYKYLGPGNGLDKGEPVNAADAAALEHDKAYDQQLKAGDNPYLKYNHADAEFQERLKEDTSFGGNLGRAVFQAKKRLLEPLGLVEEAAKTAPGKKRPVEQSPQEPDSSAGIGKSGAQPAKKRLNFGQTGDTESVPDPQPIGEPPAAPSGVGSLTMASGGGAPVADNNEGADGVGSSSGNWHCDSQWLGDRVITTSTRTWALPTYNNHLYKQISNSTSGGSSNDNAYFGYSTPWGYFDFNRFHCHFSPRDWQRLINNNWGFRPKRLNFKLFNIQVKEVTDNNGVKTIANNLTSTVQVFTDSDYQLPYVLGSAHEGCLPPFPADVFMIPQYGYLTLNDGSQAFGRSSFYCLEYFPSQMLRTGNNFQFSYEFENVPFHSSYAHSQSLDRLMNPLIDQYLYYLSKTINGSGQGQQTLKFSVAGPSNMAVQGRNYIPGPSYRQQRVSTTVTFNNNSEFAWPGASSWALNGRNSLMNPGPAMASHKEGEDRFFPLSGSLIFGKQGTGRDNVDADKVMITNEEEIKTTNPVATESYGQVATNHQSARAQAQTGWVQNQGILPGMVWQDRDVYLQGPIWAKIPHTDGNFHPSPLMGGFGMKHPPPQILIKNTPVPADPPTAFNKGKLNSFITQYSTGQVSVEIEWELQKENSKRWNPEIQYTSNYYKSNNVEFAVNTEGVYSEPRPIGTRYLTRNL

SEQ ID NO: 1107 - DNA, 2208 bp, synthetic construct
  misc_feature 1..2208: note = Adeno Associated Virus Capsid Protein Variant
  source 1..2208: mol_type = other DNA
atggctgccgatggttatcttccagattggctcgaggacaaccttagtgaaggaattcgcgagtggtgggctttgaaacctggagcccctcaacccaaggcaaatcaacaacatcaagacaacgctcgaggtcttgtgcttccgggttacaaatactcgggacccggcaacggactcgacaagggggagccggtcaacgcagcagacgcggcggccctcgagcacgacaaggcctacgaccagcagctcaaggccggagacaacccgtacctcaagtacaaccacgccgacgccgagttccaggagcggctcaaagaagatacgtcttttgggggcaacctcgggcgagcagtcttccaggccaaaaagaggcttcttgaacctcttggtctggttgaggaagcggctaagacggctcctggaaagaagaggcctgtagagcagtctcctcaggaaccggactcctccgcgggtattggcaaatcgggtgcacagcccgctaaaaagagactcaatttcggtcagactggcgacacagagtcagtcccagaccctcaaccaatcggagaacctcccgcagccccctcaggtgtgggatctcttacaatggcttcaggtggtggcgcaccagtggcagacaataacgaaggtgccgatggagtgggtagttcctcgggaaattggcattgcgattcccaatggctgggggacagagtcatcaccaccagcacccgaacctgggccctgcccacctacaacaatcacctctacaagcaaatctccaacagcacatctggaggatcttcaaatgacaacgcctacttcggctacagcaccccctgggggtattttgacttcaacagattccactgccacttctcaccacgtgactggcagcgactcatcaacaacaactggggattccggcctaagcgactcaacttcaagctcttcaacattcaggtcaaagaggttacggacaacaatggagtcaagaccatcgccaataaccttaccagcacggtccaggtcttcacggactcagactatcagctcccgtacgtgctcgggtcggctcacgagggctgcctcccgccgttcccagcggacgttttcatgattcctcagtacgggtatctgacgcttaatgatggaagccaggccgtgggtcgttcgtccttttactgcctggaatatttcccgtcgcaaatgctaagaacgggtaacaacttccagttcagctacgagtttgagaacgtacctttccatagcagctacgctcacagccaaagcctggaccgactaatgaatccactcatcgaccaatacttgtactatctctcaaagactattaacggttctggacagggccaacaaacgctaaaattcagtgtggccggacccagcaacatggctgtccagggaagaaactacatacctggacccagctaccgacaacaacgtgtctcaaccactgtgacttttaacaacaacagcgaatttgcttggcctggagcttcttcttgggctctcaatggacgtaatagcttgatgaatcctggacctgctatggccagccacaaagaaggagaggaccgtttctttcctttgtctggatctttaatttttggcaaacaaggaactggaagagacaacgtggatgcggacaaagtcatgataaccaacgaagaagaaattaaaactactaacccggtagcaacggagtcctatggacaagtggccacaaaccaccagagtgcccgggcacaggcgcagaccggctgggttcaaaaccaaggaatacttccgggtatggtttggcaggacagagatgtgtacctgcaaggacccatttgggccaaaattcctcacacggacggcaactttcacccttctccgctgatgggagggtttggaatgaagcacccgcctcctcagatcctcatcaaaaacacacctgtacctgcggatcctccaacggccttcaacaagggcaagctgaactctttcatcacccagtattctactggccaagtcagcgtggagatcgagtgggagctgcagaaggaaaacagcaagcgctggaacccggagatccagtacacttccaactattacaagtctaataatgttgaatttgctgttaatactgaaggtgtatatagtgaaccccgccccattggcaccagatacctgactcgtaatctg

SEQ ID NO: 1108 - protein, 736 aa, synthetic construct
  REGION 1..736: note = Adeno Associated Virus Capsid Protein Variant
MAADGYLPDWLEDNLSEGIREWWALKPGAPQPKANQQHQDNARGLVLPGYKYSGPGNGLDKGEPVNAADAAALEHDKAYDQQLKAGDNPYLKYNHADAEFQERLKEDTSFGGNLGRAVFQAKKRLLEPLGLVEEAAKTAPGKKRPVEQSPQEPDSSAGIGKSGAQPAKKRLNFGQTGDTESVPDPQPIGEPPAAPSGVGSLTMASGGGAPVADNNEGADGVGSSSGNWHCDSQWLGDRVITTSTRTWALPTYNNHLYKQISNSTSGGSSNDNAYFGYSTPWGYFDFNRFHCHFSPRDWQRLINNNWGFRPKRLNFKLFNIQVKEVTDNNGVKTIANNLTSTVQVFTDSDYQLPYVLGSAHEGCLPPFPADVFMIPQYGYLTLNDGSQAVGRSSFYCLEYFPSQMLRTGNNFQFSYEFENVPFHSSYAHSQSLDRLMNPLIDQYLYYLSKTINGSGQGQQTLKFSVAGPSNMAVQGRNYIPGPSYRQQRVSTTVTFNNNSEFAWPGASSWALNGRNSLMNPGPAMASHKEGEDRFFPLSGSLIFGKQGTGRDNVDADKVMITNEEEIKTTNPVATESYGQVATNHQSARAQAQTGWVQNQGILPGMVWQDRDVYLQGPIWAKIPHTDGNFHPSPLMGGFGMKHPPPQILIKNTPVPADPPTAFNKGKLNSFITQYSTGQVSVEIEWELQKENSKRWNPEIQYTSNYYKSNNVEFAVNTEGVYSEPRPIGTRYLTRNL

SEQ ID NO: 1109 - DNA, 2208 bp, synthetic construct
  misc_feature 1..2208: note = Adeno Associated Virus Capsid Protein Variant
  source 1..2208: mol_type = other DNA
atggctgccgatggttatcttccagattggctcgaggacaaccttagtgaaggaattcgcgagtggtgggctttgaaacctggagcccctcaacccaaggcaaatcaacaacatcaagacaacgctcgaggtcttgtgcttccgggttacaaataccttggacccggcaacggactcgacaagggggagccggtcaacgcagcagacgcggcggccctcgagcacgacaaggcctacgaccagcagctcaaggccggagacaacccgtacctcaagtacaaccacgccgacgccgagttccaggagcggctcaaagaagatacgtcttttgggggcaacctcgggcgagcagtcttccaggccaaaaagaggcttcttgaacctcttggtctggttgaggaagcggctaagacggctcctggaaagaagaggcctgtagagcagtctcctcaggaaccggactcctccgcgggtattggcaaatcgggtgcacagcccgctaaaaagagactcaatttcggtcagactggcgacacagagtcagtcccagaccctcaaccaatcggagaacctcccgcagccccctcaggtgtgggatctcttacaatggcttcaggtggtggcgcaccagtggcagacaataacgaaggtgccgatggagtgggtagttcctcgggaaattggcattgcgattcccaatggctgggggacagagtcatcaccaccagcacccgaacctgggccctgcccacctacaacaatcacctctacaagcaaatctccaacagcacatcttccggatcttcaaatgacaacgcctacttcggctacagcaccccctgggggtattttgacttcaacagattccactgccacttctcaccacgtgactggcagcgactcatcaacaacaactggggattccggcctaagcgactcaacttcaagctcttcaacattcaggtcaaagaggttacggacaacaatggagtcaagaccatcgccaataaccttaccagcacggtccaggtcttcacggactcagactatcagctcccgtacgtgctcgggtcggctcacgagggctgcctcccgccgttcccagcggacgttttcatgattcctcagtacgggtatctgacgcttaatgatggaagccaggccgtgggtcgttcgtccttttactgcctggaatatttcccgtcgcaaatgctaagaacgggtaacaacttccagttcagctacgagtttgagaacgtacctttccatagcagctacgctcacagccaaagcctggaccgactaatgaatccactcatcgaccaatacttgtactatctctcaaagactattaacggttctggacagggccaacaaacgctaaaattcagtgtggccggacccagcaacatggctgtccagggaagaaactacatacctggacccagctaccgacaacaacgtgtctcaaccactgtgacttttaacaacaacagcgaatttgcttggcctggagcttcttcttgggctctcaatggacgtaatagcttgatgaatcctggacctgctatggccagccacaaagaaggagaggaccgtttctttcctttgtctggatctttaatttttggcaaacaaggaactggaagagacaacgtggatgcggacaaagtcatgataaccaacgaagaagaaattaaaactactaacccggtagcaacggagtcctatggacaagtggccacaaaccaccagagtgcccgggcacaggcgcagaccggctgggttcaaaaccaaggaatacttccgggtatggtttggcaggacagagatgtgtacctgcaaggacccatttgggccaaaattcctcacacggacggcaactttcacccttctccgctgatgggagggtttggaatgaagcacccgcctcctcagatcctcatcaaaaacacacctgtacctgcggatcctccaacggccttcaacaagggcaagctgaactctttcatcacccagtattctactggccaagtcagcgtggagatcgagtgggagctgcagaaggaaaacagcaagcgctggaacccggagatccagtacacttccaactattacaagtctaataatgttgaatttgctgttaatactgaaggtgtatatagtgaaccccgccccattggcaccagatacctgactcgtaatctg

SEQ ID NO: 1110 - protein, 736 aa, synthetic construct
  REGION 1..736: note = Adeno Associated Virus Capsid Protein Variant
MAADGYLPDWLEDNLSEGIREWWALKPGAPQPKANQQHQDNARGLVLPGYKYLGPGNGLDKGEPVNAADAAALEHDKAYDQQLKAGDNPYLKYNHADAEFQERLKEDTSFGGNLGRAVFQAKKRLLEPLGLVEEAAKTAPGKKRPVEQSPQEPDSSAGIGKSGAQPAKKRLNFGQTGDTESVPDPQPIGEPPAAPSGVGSLTMASGGGAPVADNNEGADGVGSSSGNWHCDSQWLGDRVITTSTRTWALPTYNNHLYKQISNSTSSGSSNDNAYFGYSTPWGYFDFNRFHCHFSPRDWQRLINNNWGFRPKRLNFKLFNIQVKEVTDNNGVKTIANNLTSTVQVFTDSDYQLPYVLGSAHEGCLPPFPADVFMIPQYGYLTLNDGSQAVGRSSFYCLEYFPSQMLRTGNNFQFSYEFENVPFHSSYAHSQSLDRLMNPLIDQYLYYLSKTINGSGQGQQTLKFSVAGPSNMAVQGRNYIPGPSYRQQRVSTTVTFNNNSEFAWPGASSWALNGRNSLMNPGPAMASHKEGEDRFFPLSGSLIFGKQGTGRDNVDADKVMITNEEEIKTTNPVATESYGQVATNHQSARAQAQTGWVQNQGILPGMVWQDRDVYLQGPIWAKIPHTDGNFHPSPLMGGFGMKHPPPQILIKNTPVPADPPTAFNKGKLNSFITQYSTGQVSVEIEWELQKENSKRWNPEIQYTSNYYKSNNVEFAVNTEGVYSEPRPIGTRYLTRNL

SEQ ID NO: 1111 - DNA, 2208 bp, synthetic construct
  misc_feature 1..2208: note = Adeno Associated Virus Capsid Protein Variant
  source 1..2208: mol_type = other DNA
atggctgccgatggttatcttccagattggctcgaggacaaccttagtgaaggaattcgcgagtggtgggctttgaaacctggagcccctcaacccaaggcaaatcaacaacatcaagacaacgctcgaggtcttgtgcttccgggttacaaataccttggacccggcaacggactcgacaagggggagccggtcaacgcagcagacgcggcggccctcgagcacgacaaggcctacgaccagcagctcaaggccggagacaacccgtacctcaagtacaaccacgccgacgccgagttccaggagcggctcaaagaagatacgtcttttgggggcaacctcgggcgagcagtcttccaggccaaaaagaggcttcttgaacctcttggtctggttgaggaagcggctaagacggctcctggaaagaagaggcctgtagagcagtctcctcaggaaccggactcctccgcgggtattggcaaatcgggtgcacagcccgctaaaaagagactcaatttcggtcagactggcgacacagagtcagtcccagaccctcaaccaatcggagaacctcccgcagccccctcaggtgtgggatctcttacaatggcttcaggtggtggcgcaccagtggcagacaataacgaaggtgccgatggagtgggtagttcctcgggaaattggcattgcgattcccaatggctgggggacagagtcatcaccaccagcacccgaacctgggccctgcccacctacaacaatcacctctacaagcaaatctccaacagcacatctggaggatcttcagtcgacaacgcctacttcggctacagcaccccctgggggtattttgacttcaacagattccactgccacttctcaccacgtgactggcagcgactcatcaacaacaactggggattccggcctaagcgactcaacttcaagctcttcaacattcaggtcaaagaggttacggacaacaatggagtcaagaccatcgccaataaccttaccagcacggtccaggtcttcacggactcagactatcagctcccgtacgtgctcgggtcggctcacgagggctgcctcccgccgttcccagcggacgttttcatgattcctcagtacgggtatctgacgcttaatgatggaagccaggccgtgggtcgttcgtccttttactgcctggaatatttcccgtcgcaaatgctaagaacgggtaacaacttccagttcagctacgagtttgagaacgtacctttccatagcagctacgctcacagccaaagcctggaccgactaatgaatccactcatcgaccaatacttgtactatctctcaaagactattaacggttctggacagggccaacaaacgctaaaattcagtgtggccggacccagcaacatggctgtccagggaagaaactacatacctggacccagctaccgacaacaacgtgtctcaaccactgtgacttttaacaacaacagcgaatttgcttggcctggagcttcttcttgggctctcaatggacgtaatagcttgatgaatcctggacctgctatggccagccacaaagaaggagaggaccgtttctttcctttgtctggatctttaatttttggcaaacaaggaactggaagagacaacgtggatgcggacaaagtcatgataaccaacgaagaagaaattaaaactactaacccggtagcaacggagtcctatggacaagtggccacaaaccaccagagtgcccgggcacaggcgcagaccggctgggttcaaaaccaaggaatacttccgggtatggtttggcaggacagagatgtgtacctgcaaggacccatttgggccaaaattcctcacacggacggcaactttcacccttctccgctgatgggagggtttggaatgaagcacccgcctcctcagatcctcatcaaaaacacacctgtacctgcggatcctccaacggccttcaacaagggcaagctgaactctttcatcacccagtattctactggccaagtcagcgtggagatcgagtgggagctgcagaaggaaaacagcaagcgctggaacccggagatccagtacacttccaactattacaagtctaataatgttgaatttgctgttaatactgaaggtgtatatagtgaaccccgccccattggcaccagatacctgactcgtaatctg

SEQ ID NO: 1112 - protein, 736 aa, synthetic construct
  REGION 1..736: note = Adeno Associated Virus Capsid Protein Variant
MAADGYLPDWLEDNLSEGIREWWALKPGAPQPKANQQHQDNARGLVLPGYKYLGPGNGLDKGEPVNAADAAALEHDKAYDQQLKAGDNPYLKYNHADAEFQERLKEDTSFGGNLGRAVFQAKKRLLEPLGLVEEAAKTAPGKKRPVEQSPQEPDSSAGIGKSGAQPAKKRLNFGQTGDTESVPDPQPIGEPPAAPSGVGSLTMASGGGAPVADNNEGADGVGSSSGNWHCDSQWLGDRVITTSTRTWALPTYNNHLYKQISNSTSGGSSVDNAYFGYSTPWGYFDFNRFHCHFSPRDWQRLINNNWGFRPKRLNFKLFNIQVKEVTDNNGVKTIANNLTSTVQVFTDSDYQLPYVLGSAHEGCLPPFPADVFMIPQYGYLTLNDGSQAVGRSSFYCLEYFPSQMLRTGNNFQFSYEFENVPFHSSYAHSQSLDRLMNPLIDQYLYYLSKTINGSGQGQQTLKFSVAGPSNMAVQGRNYIPGPSYRQQRVSTTVTFNNNSEFAWPGASSWALNGRNSLMNPGPAMASHKEGEDRFFPLSGSLIFGKQGTGRDNVDADKVMITNEEEIKTTNPVATESYGQVATNHQSARAQAQTGWVQNQGILPGMVWQDRDVYLQGPIWAKIPHTDGNFHPSPLMGGFGMKHPPPQILIKNTPVPADPPTAFNKGKLNSFITQYSTGQVSVEIEWELQKENSKRWNPEIQYTSNYYKSNNVEFAVNTEGVYSEPRPIGTRYLTRNL

SEQ ID NO: 1113 - DNA, 2208 bp, synthetic construct
  misc_feature 1..2208: note = Adeno Associated Virus Capsid Protein Variant
  source 1..2208: mol_type = other DNA
atggctgccgatggttatcttccagattggctcgaggacaaccttagtgaaggaattcgcgagtggtgggctttgaaacctggagcccctcaacccaaggcaaatcaacaacatcaagacaacgctcgaggtcttgtgcttccgggttacaaataccttggacccggcaacggactcgacaagggggagccggtcaacgcagcagacgcggcggccctcgagcacgacaaggcctacgaccagcagctcaaggccggagacaacccgtacctcaagtacaaccacgccgacgccgagttccaggagcggctcaaagaagatacgtcttttgggggcaacctcgggcgagcagtcttccaggccaaaaagaggcttcttgaacctcttggtctggttgaggaagcggctaagacggctcctggaaagaagaggcctgtagagcagtctcctcaggaaccggactcctccgcgggtattggcaaatcgggtgcacagcccgctaaaaagagactcaatttcggtcagactggcgacacagagtcagtcccagaccctcaaccaatcggagaacctcccgcagccccctcaggtgtgggatctcttacaatggcttcaggtggtggcgcaccagtggcagacaataacgaaggtgccgatggagtgggtagttcctcgggaaattggcattgcgattcccaatggctgggggacagagtcatcaccaccagcacccgaacctgggccctgcccacctacaacaatcacctctacaagcaaatctccaactggacatctggaggatcttcaaatgacaacgcctacttcggctacagcaccccctgggggtattttgacttcaacagattccactgccacttctcaccacgtgactggcagcgactcatcaacaacaactggggattccggcctaagcgactcaacttcaagctcttcaacattcaggtcaaagaggttacggacaacaatggagtcaagaccatcgccaataaccttaccagcacggtccaggtcttcacggactcagactatcagctcccgtacgtgctcgggtcggctcacgagggctgcctcccgccgttcccagcggacgttttcatgattcctcagtacgggtatctgacgcttaatgatggaagccaggccgtgggtcgttcgtccttttactgcctggaatatttcccgtcgcaaatgctaagaacgggtaacaacttccagttcagctacgagtttgagaacgtacctttccatagcagctacgctcacagccaaagcctggaccgactaatgaatccactcatcgaccaatacttgtactatctctcaaagactattaacggttctggacagggccaacaaacgctaaaattcagtgtggccggacccagcaacatggctgtccagggaagaaactacatacctggacccagctaccgacaacaacgtgtctcaaccactgtgacttttaacaacaacagcgaatttgcttggcctggagcttcttcttgggctctcaatggacgtaatagcttgatgaatcctggacctgctatggccagccacaaagaaggagaggaccgtttctttcctttgtctggatctttaatttttggcaaacaaggaactggaagagacaacgtggatgcggacaaagtcatgataaccaacgaagaagaaattaaaactactaacccggtagcaacggagtcctatggacaagtggccacaaaccaccagagtgcccgggcacaggcgcagaccggctgggttcaaaaccaaggaatacttccgggtatggtttggcaggacagagatgtgtacctgcaaggacccatttgggccaaaattcctcacacggacggcaactttcacccttctccgctgatgggagggtttggaatgaagcacccgcctcctcagatcctcatcaaaaacacacctgtacctgcggatcctccaacggccttcaacaagggcaagctgaactctttcatcacccagtattctactggccaagtcagcgtggagatcgagtgggagctgcagaaggaaaacagcaagcgctggaacccggagatccagtacacttccaactattacaagtctaataatgttgaatttgctgttaatactgaaggtgtatatagtgaaccccgccccattggcaccagatacctgactcgtaatctg

SEQ ID NO: 1114 - protein, 736 aa, synthetic construct
  REGION 1..736: note = Adeno Associated Virus Capsid Protein Variant
MAADGYLPDWLEDNLSEGIREWWALKPGAPQPKANQQHQDNARGLVLPGYKYLGPGNGLDKGEPVNAADAAALEHDKAYDQQLKAGDNPYLKYNHADAEFQERLKEDTSFGGNLGRAVFQAKKRLLEPLGLVEEAAKTAPGKKRPVEQSPQEPDSSAGIGKSGAQPAKKRLNFGQTGDTESVPDPQPIGEPPAAPSGVGSLTMASGGGAPVADNNEGADGVGSSSGNWHCDSQWLGDRVITTSTRTWALPTYNNHLYKQISNWTSGGSSNDNAYFGYSTPWGYFDFNRFHCHFSPRDWQRLINNNWGFRPKRLNFKLFNIQVKEVTDNNGVKTIANNLTSTVQVFTDSDYQLPYVLGSAHEGCLPPFPADVFMIPQYGYLTLNDGSQAVGRSSFYCLEYFPSQMLRTGNNFQFSYEFENVPFHSSYAHSQSLDRLMNPLIDQYLYYLSKTINGSGQGQQTLKFSVAGPSNMAVQGRNYIPGPSYRQQRVSTTVTFNNNSEFAWPGASSWALNGRNSLMNPGPAMASHKEGEDRFFPLSGSLIFGKQGTGRDNVDADKVMITNEEEIKTTNPVATESYGQVATNHQSARAQAQTGWVQNQGILPGMVWQDRDVYLQGPIWAKIPHTDGNFHPSPLMGGFGMKHPPPQILIKNTPVPADPPTAFNKGKLNSFITQYSTGQVSVEIEWELQKENSKRWNPEIQYTSNYYKSNNVEFAVNTEGVYSEPRPIGTRYLTRNL

SEQ ID NO: 1115 - DNA, 2208 bp, synthetic construct
  misc_feature 1..2208: note = Adeno Associated Virus Capsid Protein Variant
  source 1..2208: mol_type = other DNA
atggctgccgatggttatcttccagattggctcgaggacaaccttagtgaaggaattcgcgagtggtgggctttgaaacctggagcccctcaacccaaggcaaatcaacaacatcaagacaacgctcgaggtcttgtgcttccgggttacaaataccttggacccggcaacggactcgacaagggggagccggtcaacgcagcagacgcggcggccctcgagcacgacaaggcctacgaccagcagctcaaggccggagacaacccgtacctcaagtacaaccacgccgacgccgagttccaggagcggctcaaagaagatacgtcttttgggggcaacctcgggcgagcagtcttccaggccaaaaagaggcttcttgaacctcttggtctggttgaggaagcggctaagacggctcctggaaagaagaggcctgtagagcagtctcctcaggaaccggactcctccgcgggtattggcaaatcgggtgcacagcccgctaaaaagagactcaatttcggtcagactggcgacacagagtcagtcccagaccctcaaccaatcggagaacctcccgcagccccctcaggtgtgggatctcttacaatggcttcaggtggtggcgcaccagtggcagacaataacgaaggtgccgatggagtgggtagttcctcgggaaattggcattgcgattcccaatggctgggggacagagtcatcaccaccagcacccgaacctgggccctgcccacctacaacaatcacctctacaagcaaatctccaacagcacatctggaggatcttcaaatgacaacgcctacttcggctacagcaccccctgggggtattttgacttcaacagattccactgccacttctcaccacgtgactggcagcgactcatcaacaacaactggggattccggcctaagcgactcaacttcaagctcttcaacattcaggtcaaagaggttacggacaacaatggagtcaagacgatcgccaataaccttaccagcacggtccaggtcttcacggactcagactatcagctcccgtacgtgctcgggtcggctcacgagggctgcctcccgccgttcccagcggacgttttcatgattcctcagtacgggtatctgacgcttaatgatggaagccaggccgtgggtcgttcgtccttttactgcctggaatatttcccgtcgcaaatgctaagaacgggtaacaacttccagttcagctacgagtttgagaacgtacctttccatagcagctacgctcacagccaaagcctggaccgactaatgaatccactcatcgaccaatacttgtactatctctcaaagactattaacggttctggacagggccaacaaacgctaaaattcagtgtggccggacccagcaacatggctgtccagggaagaaactacatacctggacccagctaccgacaacaacgtgtctcaaccactgtgacttttaacaacaacagcgaatttgcttggcctggagcttcttcttgggctctcaatggacgtaatagcttgatgaatcctggacctgctatggccagccacaaagaaggagaggaccgtttctttcctttgtctggatctttaatttttggcaaacaaggaactggaagagacaacgtggatgcggacaaagtcatgataaccaacgaagaagaaattaaaactactaacccggtagcaacggagtcctatggacaagtggccacaaaccaccagagtgcccgggcacaggcgcagaccggctgggttcaaaaccaaggaatacttccgggtatggtttggcaggacagagatgtgtacctgcaaggacccatttgggccaaaattcctcacacggacggcaactttcacccttctccgctgatgggagggtttggaatgaagcacccgcctcctcagatcctcatcaaaaacacacctgtacctgcggatcctccaacggccttcaacaagggcaagctgaactctttcatcacccagtattctactggccaagtcagcgtggagatcgagtgggagctgcagaaggaaaacagcaagcgctggaacccggagatccagtacacttccaactattacaagtctaataatgttgaatttgctgttaatactgaaggtgtatatagtgaaccccgccccattggcaccagatacctgactcgtaatctg

SEQ ID NO: 1116 - protein, 736 aa, synthetic construct; identical to SEQ ID NO: 552
  REGION 1..736: note = Adeno Associated Virus Capsid Protein Variant

SEQ ID NO: 1117 - DNA, 2208 bp, synthetic construct
  misc_feature 1..2208: note = Adeno Associated Virus Capsid Protein Variant
  source 1..2208: mol_type = other DNA
atggctgccgatggttatcttccagattggctcgaggacaaccttagtgaaggaattcgcgagtggtgggctttgaaacctggagcccctcaacccaaggcaaatcaacaacatcaagacaacgctcgaggtcttgtgcttccgggttacaaataccttggacccggcaacggactcgacaagggggagccggtcaacgcagcagacgcggcggccctcgagcacgacaaggcctacgaccagcagctcaaggccggagacaacccgtacctcaagtacaaccacgccgacgccgagttccaggagcggctcaaagaagatacgtcttttgggggcaacctcgggcgagcagtcttccaggccaaaaagaggcttcttgaacctcttggtctggttgaggaagcggctaagacggctcctggaaagaagaggcctgtagagcagtctcctcaggaaccggactcctccgcgggtattggcaaatcgggtgcacagcccgctaaaaagagactcaatttcggtcagactggcgacacagagtcagtcccagaccctcaaccaatcggagaacctcccgcagccccctcaggtgtgggatctcttacaatggcttcaggtggtggcgcaccagtggcagacaataacgaaggtgccgatggagtgggtagttcctcgggaaattggcattgcgattcccaatggctgggggacagagtcatcaccaccagcacccgaacctgggccctgcccacctacaacaatcacctctacaagcaaatctccaacagcacatctcacggatcttcaaatgacaacgcctacttcggctacagcaccccctgggggtattttgacttcaacagattccactgccacttctcaccacgtgactggcagcgactcatcaacaacaactggggattccggcctaagcgactcaacttcaagctcttcaacattcaggtcaaagaggttacggacaacaatggagtcaagaccatcgccaataaccttaccagcacggtccaggtcttcacggactcagactatcagctcccgtacgtgctcgggtcggctcacgagggctgcctcccgccgttcccagcggacgttttcatgattcctcagtacgggtatctgacgcttaatgatggaagccaggccgtgggtcgttcgtccttttactgcctggaatatttcccgtcgcaaatgctaagaacgggtaacaacttccagttcagctacgagtttgagaacgtacctttccatagcagctacgctcacagccaaagcctggaccgactaatgaatccactcatcgaccaatacttgtactatctctcaaagactattaacggttctggacagggccaacaaacgctaaaattcagtgtggccggacccagcaacatggctgtccagggaagaaactacatacctggacccagctaccgacaacaacgtgtctcaaccactgtgacttttaacaacaacagcgaatttgcttggcctggagcttcttcttgggctctcaatggacgtaatagcttgatgaatcctggacctgctatggccagccacaaagaaggagaggaccgtttctttcctttgtctggatctttaatttttggcaaacaaggaactggaagagacaacgtggatgcggacaaagtcatgataaccaacgaagaagaaattaaaactactaacccggtagcaacggagtcctatggacaagtggccacaaaccaccagagtgcccgggcacaggcgcagaccggctgggttcaaaaccaaggaatacttccgggtatggtttggcaggacagagatgtgtacctgcaaggacccatttgggccaaaattcctcacacggacggcaactttcacccttctccgctgatgggagggtttggaatgaagcacccgcctcctcagatcctcatcaaaaacacacctgtacctgcggatcctccaacggccttcaacaagggcaagctgaactctttcatcacccagtattctactggccaagtcagcgtggagatcgagtgggagctgcagaaggaaaacagcaagcgctggaacccggagatccagtacacttccaactattacaagtctaataatgttgaatttgctgttaatactgaaggtgtatatagtgaaccccgccccattggcaccagatacctgactcgtaatctg

SEQ ID NO: 1118 - protein, 736 aa, synthetic construct
  REGION 1..736: note = Adeno Associated Virus Capsid Protein Variant
MAADGYLPDWLEDNLSEGIREWWALKPGAPQPKANQQHQDNARGLVLPGYKYLGPGNGLDKGEPVNAADAAALEHDKAYDQQLKAGDNPYLKYNHADAEFQERLKEDTSFGGNLGRAVFQAKKRLLEPLGLVEEAAKTAPGKKRPVEQSPQEPDSSAGIGKSGAQPAKKRLNFGQTGDTESVPDPQPIGEPPAAPSGVGSLTMASGGGAPVADNNEGADGVGSSSGNWHCDSQWLGDRVITTSTRTWALPTYNNHLYKQISNSTSHGSSNDNAYFGYSTPWGYFDFNRFHCHFSPRDWQRLINNNWGFRPKRLNFKLFNIQVKEVTDNNGVKTIANNLTSTVQVFTDSDYQLPYVLGSAHEGCLPPFPADVFMIPQYGYLTLNDGSQAVGRSSFYCLEYFPSQMLRTGNNFQFSYEFENVPFHSSYAHSQSLDRLMNPLIDQYLYYLSKTINGSGQGQQTLKFSVAGPSNMAVQGRNYIPGPSYRQQRVSTTVTFNNNSEFAWPGASSWALNGRNSLMNPGPAMASHKEGEDRFFPLSGSLIFGKQGTGRDNVDADKVMITNEEEIKTTNPVATESYGQVATNHQSARAQAQTGWVQNQGILPGMVWQDRDVYLQGPIWAKIPHTDGNFHPSPLMGGFGMKHPPPQILIKNTPVPADPPTAFNKGKLNSFITQYSTGQVSVEIEWELQKENSKRWNPEIQYTSNYYKSNNVEFAVNTEGVYSEPRPIGTRYLTRNL

SEQ ID NO: 1119 - DNA, 2208 bp, synthetic construct
  misc_feature 1..2208: note = Adeno Associated Virus Capsid Protein Variant
  source 1..2208: mol_type = other DNA
atggctgccgatggttatcttccagattggctcgaggacaaccttagtgaaggaattcgcgagtggtgggctttgaaacctggagcccctcaacccaaggcaaatcaacaacatcaagacaacgctcgaggtcttgtgcttccgggttacaaataccttggacccggcaacggactcgacaagggggagccggtcaacgcagcagacgcggcggccctcgagcacgacaaggcctacgaccagcagctcaaggccggagacaacccgtacctcaagtacaaccacgccgacgccgagttccaggagcggctcaaagaagatacgtcttttgggggcaacctcgggcgagcagtcttccaggccaaaaagaggcttcgtgaacctcttggtctggttgaggaagcggctaagacggctcctggaaagaagaggcctgtagagcagtctcctcaggaaccggactcctccgcgggtattggcaaatcgggtgcacagcccgctaaaaagagactcaatttcggtcagactggcgacacagagtcagtcccagaccctcaaccaatcggagaacctcccgcagccccctcaggtgtgggatctcttacaatggcttcaggtggtggcgcaccagtggcagacaataacgaaggtgccgatggagtgggtagttcctcgggaaattggcattgcgattcccaatggctgggggacagagtcatcaccaccagcacccgaacctgggccctgcccacctacaacaatcacctctacaagcaaatctccaacagcacatctggaggatcttcaaatgacaacgcctacttcggctacagcaccccctgggggtattttgacttcaacagattccactgccacttctcaccacgtgactggcagcgactcatcaacaacaactggggattccggcctaagcgactcaacttcaagctcttcaacattcaggtcaaagaggttacggacaacaatggagtcaagaccatcgccaataaccttaccagcacggtccaggtcttcacggactcagactatcagctcccgtacgtgctcgggtcggctcacgagggctgcctcccgccgttcccagcggacgttttcatgattcctcagtacgggtatctgacgcttaatgatggaagccaggccgtgggtcgttcgtccttttactgcctggaatatttcccgtcgcaaatgctaagaacgggtaacaacttccagttcagctacgagtttgagaacgtacctttccatagcagctacgctcacagccaaagcctggaccgactaatgaatccactcatcgaccaatacttgtactatctctcaaagactattaacggttctggacagggccaacaaacgctaaaattcagtgtggccggacccagcctcatggctgtccagggaagaaactacatacctggacccagctaccgacaacaacgtgtctcaaccactgtgacttttaacaacaacagcgaatttgcttggcctggagcttcttcttgggctctcaatggacgtaatagcttgatgaatcctggacctgctatggccagccacaaagaaggagaggaccgtttctttcctttgtctggatctttaatttttggcaaacaaggaactggaagagacaacgtggatgcggacaaagtcatgataaccaacgaagaagaaattaaaactactaacccggtagcaacggagtcctatggacaagtggccacaaaccaccagagtgcccgggcacaggcgcagaccggctgggttcaaaaccaaggaatacttccgggtatggtttggcaggacagagatgtgtacctgcaaggacccatttgggccaaaattcctcacacggacggcaactttcacccttctccgctgatgggagggtttggaatgaagcacccgcctcctcagatcctcatcaaaaacacacctgtacctgcggatcctccaacggccttcaacaagggcaagctgaactctttcatcacccagtattctactggccaagtcagcgtggagatcgagtgggagctgcagaaggaaaacagcaagcgctggaacccggagatccagtacacttccaactattacaagtctaataatgttgaatttgctgttaatactgaaggtgtatatagtgaaccccgccccattggcaccagatacctgactcgtaatctg

SEQ ID NO: 1120 - protein, 736 aa, synthetic construct
  REGION 1..736: note = Adeno Associated Virus Capsid Protein Variant
MAADGYLPDWLEDNLSEGIREWWALKPGAPQPKANQQHQDNARGLVLPGYKYLGPGNGLDKGEPVNAADAAALEHDKAYDQQLKAGDNPYLKYNHADAEFQERLKEDTSFGGNLGRAVFQAKKRLREPLGLVEEAAKTAPGKKRPVEQSPQEPDSSAGIGKSGAQPAKKRLNFGQTGDTESVPDPQPIGEPPAAPSGVGSLTMASGGGAPVADNNEGADGVGSSSGNWHCDSQWLGDRVITTSTRTWALPTYNNHLYKQISNSTSGGSSNDNAYFGYSTPWGYFDFNRFHCHFSPRDWQRLINNNWGFRPKRLNFKLFNIQVKEVTDNNGVKTIANNLTSTVQVFTDSDYQLPYVLGSAHEGCLPPFPADVFMIPQYGYLTLNDGSQAVGRSSFYCLEYFPSQMLRTGNNFQFSYEFENVPFHSSYAHSQSLDRLMNPLIDQYLYYLSKTINGSGQGQQTLKFSVAGPSLMAVQGRNYIPGPSYRQQRVSTTVTFNNNSEFAWPGASSWALNGRNSLMNPGPAMASHKEGEDRFFPLSGSLIFGKQGTGRDNVDADKVMITNEEEIKTTNPVATESYGQVATNHQSARAQAQTGWVQNQGILPGMVWQDRDVYLQGPIWAKIPHTDGNFHPSPLMGGFGMKHPPPQILIKNTPVPADPPTAFNKGKLNSFITQYSTGQVSVEIEWELQKENSKRWNPEIQYTSNYYKSNNVEFAVNTEGVYSEPRPIGTRYLTRNL

SEQ ID NO: 1121 - DNA, 2208 bp, synthetic construct
  misc_feature 1..2208: note = Adeno Associated Virus Capsid Protein Variant
  source 1..2208: mol_type = other DNA
atggctgccgatggttatcttccagattggctcgaggacaaccttagtgaaggaattcgcgagtggtgggctttgaaacctggagcccctcaacccaaggcaaatcaacaacatcaagacaacgctcgaggtcttgtgcttccgggttacaaataccttggacccggcaacggactcgacaagggggagccggtcaacgcagcagacgcggcggccctcgagcacgacaaggcctacgaccagcagctcaaggccggagacaacccgtacctcaagtacaaccacgccgacgccgagttccaggagcggctcaaagaagatacgtcttttgggggcaacctcgggcgagcagtcttccaggccaaaaagaggcttcttgaacctcttggtctggttgaggaagcggctaagacggctcctggaaagaagaggcctgtagagcagtctcctcaggaaccggactcctccgcgggtattggcaaatcgggtgcacagcccgctaaaaagagactcaatttcggtcagactggcgacacagagtcagtcccagaccctcaaccaatcggagaacctcccgcagccccctcaggtgtgggatctcttacaatggcttcaggtggtggcgcaccagtggcagacaataacgaaggtgccgatggagtgggtagttcctcgggaaattggcattgcgattcccaatggctgggggacagagtcatcaccaccagcacccgaacctgggccctgcccacctacaacaatcacctctacaagcaaatctccaacagcacatctggaggatcttcaaatgacaacgcctacttcggctacagcaccccctgggggtattttgacttcaacagattccactgccacttctcaccacgtgactggcagcgactcatcaacaacaactggggattccggcctaagcgactcaacttcaagctcttcaacattcaggtcaaagaggttacggacaacaatggagtcaagaccatcgccaataaccttaccagcacggtccaggtcttcacggactcagactatcagctcccgtacgtgctcgggtcggctcacgagggctgcctcccgccgttcccagcggacgttttcatgattcctcagtacgggtatctgacgcttaatgatggaagccaggccgtgggtcgttcgtccttttactgcctggaatatttcccgtcgcaaatgctaagaacgggtaacaacttccagttcagctacgagtttgagaacgtacctttccatagcagctacgctcacagccaaagcctggaccgactaatgaatccactcatcgaccaatacttgtactatctctcaaagactattaacggttctggacagggccaacaaacgctaaaattcagtgtggccggacccagcaacatggctgtccagggaagaaactacatacctggacccagctaccgacaacaacgtgtctcaaccactgtgacttttaacaacaacagcgaatttgcttggcctggagcttcttcttggcagctcaatggacgtaatagcttgatgaatcctggacctgctatggccagccacaaagaaggagaggaccgtttctttcctttgtctggatctttaatttttggcaaacaaggaactggaagagacaacgtggatgcggacaaagtcatgataaccaacgaagaagaaattaaaactactaacccggtagcaacggagtcctatggacaagtggccacaaaccaccagagtgcccgggcacaggcgcagaccggctgggttcaaaaccaaggaatacttccgggtatggtttggcaggacagagatgtgtacctgcaaggacccatttgggccaaaattcctcacacggacggcaactttcacccttctccgctgatgggagggtttggaatgaagcacccgcctcctcagatcctcatcaaaaacacacctgtacctgcggatcctccaacggccttcaacaagggcaagctgaactctttcatcacccagtattctactggccaagtcagcgtggagatcgagtgggagctgcagaaggaaaacagcaagcgctggaacccggagatccagtacacttccaactattacaagtctaataatgttgaatttgctgttaatactgaaggtgtatatagtgaaccccgccccattggcaccagatacctgactcgtaatctg

SEQ ID NO: 1122 - protein, 736 aa, synthetic construct
  REGION 1..736: note = Adeno Associated Virus Capsid Protein Variant
MAADGYLPDWLEDNLSEGIREWWALKPGAPQPKANQQHQDNARGLVLPGYKYLGPGNGLDKGEPVNAADAAALEHDKAYDQQLKAGDNPYLKYNHADAEFQERLKEDTSFGGNLGRAVFQAKKRLLEPLGLVEEAAKTAPGKKRPVEQSPQEPDSSAGIGKSGAQPAKKRLNFGQTGDTESVPDPQPIGEPPAAPSGVGSLTMASGGGAPVADNNEGADGVGSSSGNWHCDSQWLGDRVITTSTRTWALPTYNNHLYKQISNSTSGGSSNDNAYFGYSTPWGYFDFNRFHCHFSPRDWQRLINNNWGFRPKRLNFKLFNIQVKEVTDNNGVKTIANNLTSTVQVFTDSDYQLPYVLGSAHEGCLPPFPADVFMIPQYGYLTLNDGSQAVGRSSFYCLEYFPSQMLRTGNNFQFSYEFENVPFHSSYAHSQSLDRLMNPLIDQYLYYLSKTINGSGQGQQTLKFSVAGPSNMAVQGRNYIPGPSYRQQRVSTTVTFNNNSEFAWPGASSWQLNGRNSLMNPGPAMASHKEGEDRFFPLSGSLIFGKQGTGRDNVDADKVMITNEEEIKTTNPVATESYGQVATNHQSARAQAQTGWVQNQGILPGMVWQDRDVYLQGPIWAKIPHTDGNFHPSPLMGGFGMKHPPPQILIKNTPVPADPPTAFNKGKLNSFITQYSTGQVSVEIEWELQKENSKRWNPEIQYTSNYYKSNNVEFAVNTEGVYSEPRPIGTRYLTRNL

SEQ ID NO: 1123 - DNA, 2208 bp, synthetic construct
  misc_feature 1..2208: note = Adeno Associated Virus Capsid Protein Variant
  source 1..2208: mol_type = other DNA
atggctgccgatggttatcttccagattggctcgaggacaaccttagtgaaggaattcgcgagtggtgggctttgaaacctggagcccctcaacccaaggcaaatcaacaacatcaagacaacgctcgaggtcttgtgcttccgggttacaaataccttggacccggcaacggactcgacaagggggagccggtcaacgcagcagacgcggcggccctcgagcacgacaaggcctacgaccagcagctcaaggccggagacaacccgtacctcaagtacaaccacgccgacgccgagttccaggagcggctcaaagaagatacgtcttttgggggcaacctcgggcgagcagtcttccaggccaaaaagaggcttcttgaacctcttggtctggttgaggaagcggctaagacggctcctggaaagaagaggcctgtagagcagtctcctcaggaaccggactcctccgcgggtattggcaaatcgggtgcacagcccgctaaaaagagactcaatttcggtcagactggcgacacagagtcagtcccagaccctcaaccaatcggagaacctcccgcagccccctcaggtgtgggatctcttacaatggcttcaggtggtggcgcaccagtggcagacaataacgaaggtgccgatggagtgggtagttcctcgggaaattggcattgcgattcccaatggctgggggacagagtcatcaccaccagcacccgaacctgggccctgcccacctacaacaatcacctctacaagcaaatctccaacagcacatctacgggatcttcaaatgacaacgcctacttcggctacagcaccccctgggggtattttgacttcaacagattccactgccacttctcaccacgtgactggcagcgactcatcaacaacaactggggattccggcctaagcgactcaacttcaagctcttcaacattcaggtcaaagaggttacggacaacaatggagtcaagaccatcgccaataaccttaccagcacggtccaggtcttcacggactcagactatcagctcccgtacgtgctcgggtcggctcacgagggctgcctcccgccgttcccagcggacgttttcatgattcctcagtacgggtatctgacgcttaatgatggaagccaggccgtgggtcgttcgtccttttactgcctggaatatttcccgtcgcaaatgctaagaacgggtaacaacttccagttcagctacgagtttgagaacgtacctttccatagcagctacgctcacagccaaagcctggaccgactaatgaatccactcatcgaccaatacttgtactatctctcaaagactattaacggttctggacagggccaacaaacgctaaaattcagtgtggccggacccagcaacatggctgtccagggaagaaactacatacctggacccagctaccgacaacaacgtgtctcaaccactgtgacttttaacaacaacagcgaatttgcttggcctggagcttcttcttgggctctcaatggacgtaatagcttgatgaatcctggacctgctatggccagccacaaagaaggagaggaccgtttctttcctttgtctggatctttaatttttggcaaacaaggaactggaagagacaacgtggatgcggacaaagtcatgataaccaacgaagaagaaattaaaactactaacccggtagcaacggagtcctatggacaagtggccacaaaccaccagagtgcccgggcacaggcgcagaccggctgggttcaaaaccaaggaatacttccgggtatggtttggcaggacagagatgtgtacctgcaaggacccatttgggccaaaattcctcacacggacggcaactttcacccttctccgctgatgggagggtttggaatgaagcacccgcctcctcagatcctcatcaaaaacacacctgtacctgcggatcctccaacggccttcaacaagggcaagctgaactctttcatcacccagtattctactggccaagtcagcgtggagatcgagtgggagctgcagaaggaaaacagcaagcgctggaacccggagatccagtacacttccaactattacaagtctaataatgttgaatttgctgttaatactgaaggtgtatatagtgaaccccgccccattggcaccagatacctgactcgtaatctg

SEQ ID NO: 1124 - protein, 736 aa, synthetic construct
  REGION 1..736: note = Adeno Associated Virus Capsid Protein Variant
MAADGYLPDWLEDNLSEGIREWWALKPGAPQPKANQQHQDNARGLVLPGYKYLGPGNGLDKGEPVNAADAAALEHDKAYDQQLKAGDNPYLKYNHADAEFQERLKEDTSFGGNLGRAVFQAKKRLLEPLGLVEEAAKTAPGKKRPVEQSPQEPDSSAGIGKSGAQPAKKRLNFGQTGDTESVPDPQPIGEPPAAPSGVGSLTMASGGGAPVADNNEGADGVGSSSGNWHCDSQWLGDRVITTSTRTWALPTYNNHLYKQISNSTSTGSSNDNAYFGYSTPWGYFDFNRFHCHFSPRDWQRLINNNWGFRPKRLNFKLFNIQVKEVTDNNGVKTIANNLTSTVQVFTDSDYQLPYVLGSAHEGCLPPFPADVFMIPQYGYLTLNDGSQAVGRSSFYCLEYFPSQMLRTGNNFQFSYEFENVPFHSSYAHSQSLDRLMNPLIDQYLYYLSKTINGSGQGQQTLKFSVAGPSNMAVQGRNYIPGPSYRQQRVSTTVTFNNNSEFAWPGASSWALNGRNSLMNPGPAMASHKEGEDRFFPLSGSLIFGKQGTGRDNVDADKVMITNEEEIKTTNPVATESYGQVATNHQSARAQAQTGWVQNQGILPGMVWQDRDVYLQGPIWAKIPHTDGNFHPSPLMGGFGMKHPPPQILIKNTPVPADPPTAFNKGKLNSFITQYSTGQVSVEIEWELQKENSKRWNPEIQYTSNYYKSNNVEFAVNTEGVYSEPRPIGTRYLTRNL

SEQ ID NO: 1125 - DNA, 2208 bp, synthetic construct
  misc_feature 1..2208: note = Adeno Associated Virus Capsid Protein Variant
  source 1..2208: mol_type = other DNA
atggctgccgatggttatcttccagattggctcgaggacaaccttagtgaaggaattcgcgagtggtgggctttgaaacctggagcccctcaacccaaggcaaatcaacaacatcaagacaacgctcgaggtcttgtgcttccgggttacaaataccttggacccggcaacggactcgacaagggggagccggtcaacgcagcagacgcggcggccctcgagcacgacaaggcctacgaccagcagctcaaggccggagacaacccgtacctcaagtacaaccacgccgacgccgagttccaggagcggctcaaagaagatacgtcttttgggggcaacctcgggcgagcagtcttccaggccaaaaagaggcttcttgaacctcttggtctggttgaggaagcggctaagacggctcctggaaagaagaggcctgtagagcagtctcctcaggaaccggactcctccgcgggtattggcaaatcgggtgcacagcccgctaaaaagagactcaatttcggtcagactggcgacacagagtcagtcccagaccctcaaccaatcggagaacctcccgcagccccctcaggtgtgggatctcttacaatggcttcaggtggtggcgcaccagtggcagacaataacgaaggtgccgatggagtgggtagttcctcgggaaattggcattgcgattcccaatggctgggggacagagtcatcaccaccagcacccgaacctgggccctgcccacctacaacaatcacctctacaagcaaatctccaacagcacatctggaggatcttcaaatgacaacgcctacttcggctacagcaccccctgggggtattttgacttcaacagattccactgccacttctcaccacgtgactggcagcgactcatcaacaacaactggggattccggcctaagcgactcaacttcaagctcttcaacattcaggtcaaagaggttacggacaacaatggatcgaagaccatcgccaataaccttaccagcacggtccaggtcttcacggactcagactatcagctcccgtacgtgctcgggtcggctcacgagggctgcctcccgccgttcccagcggacgttttcatgattcctcagtacgggtatctgacgcttaatgatggaagccaggccgtgggtcgttcgtccttttactgcctggaatatttcccgtcgcaaatgctaagaacgggtaacaacttccagttcagctacgagtttgagaacgtacctttccatagcagctacgctcacagccaaagcctggaccgactaatgaatccactcatcgaccaatacttgtactatctctcaaagactattaacggttctggacagggccaacaaacgctaaaattcagtgtggccggacccagcaacatggctgtccagggaagaaactacatacctggacccagctaccgacaacaacgtgtctcaaccactgtgacttttaacaacaacagcgaatttgcttggcctggagcttcttcttgggctctcaatggacgtaatagcttgatgaatcctggacctgctatggccagccacaaagaaggagaggaccgtttctttcctttgtctggatctttaatttttggcaaacaaggaactggaagagacaacgtggatgcggacaaagtcatgataaccaacgaagaagaaattaaaactactaacccggtagcaacggagtcctatggacaagtggccacaaaccaccagagtgcccgggcacaggcgcagaccggctgggttcaaaaccaaggaatacttccgggtatggtttggcaggacagagatgtgtacctgcaaggacccatttgggccaaaattcctcacacggacggcaactttcacccttctccgctgatgggagggtttggaatgaagcacccgcctcctcagatcctcatcaaaaacacacctgtacctgcggatcctccaacggccttcaacaagggcaagctgaactctttcatcacccagtattctactggccaagtcagcgtggagatcgagtgggagctgcagaaggaaaacagcaagcgctggaacccggagatccagtacacttccaactattacaagtctaataatgttgaatttgctgttaatactgaaggtgtatatagtgaaccccgccccattggcaccagatacctgactcgtaatctg

SEQ ID NO: 1126 - protein, 736 aa, synthetic construct
  REGION 1..736: note = Adeno Associated Virus Capsid Protein Variant
MAADGYLPDWLEDNLSEGIREWWALKPGAPQPKANQQHQDNARGLVLPGYKYLGPGNGLDKGEPVNAADAAALEHDKAYDQQLKAGDNPYLKYNHADAEFQERLKEDTSFGGNLGRAVFQAKKRLLEPLGLVEEAAKTAPGKKRPVEQSPQEPDSSAGIGKSGAQPAKKRLNFGQTGDTESVPDPQPIGEPPAAPSGVGSLTMASGGGAPVADNNEGADGVGSSSGNWHCDSQWLGDRVITTSTRTWALPTYNNHLYKQISNSTSGGSSNDNAYFGYSTPWGYFDFNRFHCHFSPRDWQRLINNNWGFRPKRLNFKLFNIQVKEVTDNNGSKTIANNLTSTVQVFTDSDYQLPYVLGSAHEGCLPPFPADVFMIPQYGYLTLNDGSQAVGRSSFYCLEYFPSQMLRTGNNFQFSYEFENVPFHSSYAHSQSLDRLMNPLIDQYLYYLSKTINGSGQGQQTLKFSVAGPSNMAVQGRNYIPGPSYRQQRVSTTVTFNNNSEFAWPGASSWALNGRNSLMNPGPAMASHKEGEDRFFPLSGSLIFGKQGTGRDNVDADKVMITNEEEIKTTNPVATESYGQVATNHQSARAQAQTGWVQNQGILPGMVWQDRDVYLQGPIWAKIPHTDGNFHPSPLMGGFGMKHPPPQILIKNTPVPADPPTAFNKGKLNSFITQYSTGQVSVEIEWELQKENSKRWNPEIQYTSNYYKSNNVEFAVNTEGVYSEPRPIGTRYLTRNL

SEQ ID NO: 1127 - DNA, 2208 bp, synthetic construct
  misc_feature 1..2208: note = Adeno Associated Virus Capsid Protein Variant
  source 1..2208: mol_type = other DNA
atggctgccgatggttatcttccagattggctcgaggacaaccttagtgaaggaattcgcgagtggtgggctttgaaacctggagcccctcaacccaaggcaaatcaacaacatcaagacaacgctcgaggtcttgtgcttccgggttacaaataccttggacccggcaacggactcgacaagggggagccggtcaacgcagcagacgcggcggccctcgagcacgacaaggcctacgaccagcagctcaaggccggagacaacccgtacctcaagtacaaccacgccgacgccgagttccaggagcggctcaaagaagatacgtcttttgggggcaacctcgggcgagcagtcttccaggccaaaaagaggcttcttgaacctcttggtctggttgaggaagcggctaagacggctcctggaaagaagaggcctgtagagcagtctcctcaggaaccggactcctccgcgggtattggcaaatcgggtgcacagcccgctaaaaagagactcaatttcggtcagactggcgacacagagtcagtcccagaccctcaaccaatcggagaacctcccgcagccccctcaggtgtgggatctcttacaatggcttcaggtggtggcgcaccagtggcagacaataacgaaggtgccgatggagtgggtagttcctcgggaaattggcattgcgattcccaatggctgggggacagagtcatcaccaccagcacccgaacctgggccctgcccacctacaacaatcacctctacaagcaaatctccaacagcacatctggaggatcttcaaatgacaacgcctacttcggctacagcaccccctgggggtattttgacttcaacagattccactgccacttctcaccacgtgactggcagcgactcatcaacaacaactggggattccggcctaagcgactcaacttcaagctcttcaacattcaggtcaaagaggttacggacaacaatggagtcaagaccatcgccaataaccttaccagcacggtccaggtcttcacggactcagactatcagctcccgtacgtgctcgggtcggctcacgagggctgcctcccgccgttcccagcggacgttttcatgattcctcagtacgggtatctgacgcttaatgatggaagccaggccgtgggtcgttcgtccttttactgcctggaatatttcccgtcgcaaatgctaagaacgggtaacaacttccagttcagctacgagtttgagaacgtacctttccatagcagctacgctcacagccaaagcctggaccgactaatgaatccactcatcgaccaatacttgtactatctctcaaagactattaacggttctggacagggccaacaaacgctaaaattcagtgtggccggacccagcaacatggctgtccagggaagaaactacatacctggacccagctaccgacaacaacgtgtctcaaccactgtgacttttaacaacaacagcgaatttgcttggcctggagcttcttcttgggctctcaatggacgtaatagcttgatgaatcctggacctgctatggccagccacaaagaaggagaggaccgtttctttcctttgtctggatctttaatttttggcaaacaaggaactggaagagacaacgtggatgcggacaaagtcatgataaccaacgaagaagaaattaaaactactaacccggtagcaacggagtcctatggacaagtggccacaaaccaccagagtgcccgggcacaggcgcagaccggctgggttcaaaaccaaggaatacttccgggtatggtttggcaggacagagatgtgtacctgcaaggacccatttgggccaaaattcctcacacggacggcaactttcacccttctccgctgatgggagggtttggaatgaagcacccgcctcctcagatcctcatcaaaaacacacctgtacctgcggatcctccaacggccttcaacaagggcaagctgaactctttcatcacccagtattctactggccaagtcagcgtggagatcgagtgggagctgcagaaggaaaacagcaagcgctggaacccggagatccagtacacttccaactattacaagtctaataatgttgaatttgctgttaatactgaaggtgtatatagtgaacccatgcccattggcaccagatacctgactcgtaatctg

SEQ ID NO: 1128 - protein, 736 aa, synthetic construct
  REGION 1..736: note = Adeno Associated Virus Capsid Protein Variant
MAADGYLPDWLEDNLSEGIREWWALKPGAPQPKANQQHQDNARGLVLPGYKYLGPGNGLDKGEPVNAADAAALEHDKAYDQQLKAGDNPYLKYNHADAEFQERLKEDTSFGGNLGRAVFQAKKRLLEPLGLVEEAAKTAPGKKRPVEQSPQEPDSSAGIGKSGAQPAKKRLNFGQTGDTESVPDPQPIGEPPAAPSGVGSLTMASGGGAPVADNNEGADGVGSSSGNWHCDSQWLGDRVITTSTRTWALPTYNNHLYKQISNSTSGGSSNDNAYFGYSTPWGYFDFNRFHCHFSPRDWQRLINNNWGFRPKRLNFKLFNIQVKEVTDNNGVKTIANNLTSTVQVFTDSDYQLPYVLGSAHEGCLPPFPADVFMIPQYGYLTLNDGSQAVGRSSFYCLEYFPSQMLRTGNNFQFSYEFENVPFHSSYAHSQSLDRLMNPLIDQYLYYLSKTINGSGQGQQTLKFSVAGPSNMAVQGRNYIPGPSYRQQRVSTTVTFNNNSEFAWPGASSWALNGRNSLMNPGPAMASHKEGEDRFFPLSGSLIFGKQGTGRDNVDADKVMITNEEEIKTTNPVATESYGQVATNHQSARAQAQTGWVQNQGILPGMVWQDRDVYLQGPIWAKIPHTDGNFHPSPLMGGFGMKHPPPQILIKNTPVPADPPTAFNKGKLNSFITQYSTGQVSVEIEWELQKENSKRWNPEIQYTSNYYKSNNVEFAVNTEGVYSEPMPIGTRYLTRNL

SEQ ID NO: 1129 - DNA, 2208 bp, synthetic construct
  misc_feature 1..2208: note = Adeno Associated Virus Capsid Protein Variant
  source 1..2208: mol_type = other DNA
atggctgccgatggttatcttccagattggctcgaggacaaccttagtgaaggaattcgcgagtggtgggctttgaaacctggagcccctcaacccaaggcaaatcaacaacatcaagacaacgctcgaggtcttgtgcttccgggttacaaataccttggacccggcaacggactcgacaagggggagccggtcaacgcagcagacgcggcggccctcgagcacgacaaggcctacgaccagcagctcaaggccggagacaacccgtacctcaagtacaaccacgccgacgccgagtcgcaggagcggctcaaagaagatacgtcttttgggggcaacctcgggcgagcagtcttccaggccaaaaagaggcttcttgaacctcttggtctggttgaggaagcggctaagacggctcctggaaagaagaggcctgtagagcagtctcctcaggaaccggactcctccgcgggtattggcaaatcgggtgcacagcccgctaaaaagagactcaatttcggtcagactggcgacacagagtcagtcccagaccctcaaccaatcggagaacctcccgcagccccctcaggtgtgggatctcttacaatggcttcaggtggtggcgcaccagtggcagacaataacgaaggtgccgatggagtgggtagttcctcgggaaattggcattgcgattcccaatggctgggggacagagtcatcaccaccagcacccgaacctgggccctgcccacctacaacaatcacctctacaagcaaatctccaacagcacatctggaggatcttcaaatgacaacgcctacttcggctacagcaccccctgggggtattttgacttcaacagattccactgccacttctcaccacgtgactggcagcgactcatcaacaacaactggggattccggcctaagcgactcaacttcaagctcttcaacattcaggtcaaagaggttacggacaacaatggagtcaagaccatcgccaataaccttaccagcacggtccaggtcttcacggactcagactatcagctcccgtacgtgctcgggtcggctcacgagggctgcctcccgccgttcccagcggacgttttcatgattcctcagtacgggtatctgacgcttaatgatggaagccaggccgtgggtcgttcgtccttttactgcctggaatatttcccgtcgcaaatgctaagaacgggtaacaacttccagttcagctacgagtttgagaacgtacctttccatagcagctacgctcacagccaaagcctggaccgactaatgaatccactcatcgaccaatacttgtactatctctcaaagactattaacggttctggacagggccaacaaacgctaaaattcagtgtggccggacccagcaacatggctgtccagggaagaaactacatacctggacccagctaccgacaacaacgtgtctcaaccactgtgacttttaacaacaacagcgaatttgcttggcctggagcttcttcttgggctctcaatggacgtaatagcttgatgaatcctggacctgctatggccagccacaaagaaggagaggaccgtttctttcctttgtctggatctttaatttttggcaaacaaggaactggaagagacaacgtggatgcggacaaagtcatgataaccaacgaagaagaaattaaaactactaacccggtagcaacggagtcctatggacaagtggccacaaaccaccagagtgcccgggcacaggcgcagaccggctgggttcaaaaccaaggaatacttccgggtatggtttggcaggacagagatgtgtacctgcaaggacccatttgggccaaaattcctcacacggacggcaactttcacccttctccgctgatgggagggtttggaatgaagcacccgcctcctcagatcctcatcaaaaacacacctgtacctgcggatcctccaacggccttcaacaagggcaagctgaactctttcatcacccagtattctactggccaagtcagcgtggagatcgagtgggagctgcagaaggaaaacagcaagcgctggaacccggagatccagtacacttccaactattacaagtctaataatgttgaatttgctgttaatactgaaggtgtatatagtgaaccccgccccattggcaccagatacctgactcgtaatctg

SEQ ID NO: 1130 - protein, 736 aa, synthetic construct; identical to SEQ ID NO: 1024
  REGION 1..736: note = Adeno Associated Virus Capsid Protein Variant

SEQ ID NO: 1131 - DNA, 2208 bp, synthetic construct
  misc_feature 1..2208: note = Adeno Associated Virus Capsid Protein Variant
  source 1..2208: mol_type = other DNA
atggctgccgatggttatcttccagattggctcgaggacaaccttagtgaaggaattcgcgagtggtgggctttgaaacctggagcccctcaacccaaggcaaatcaacaacatcaagacaacgctcgaggtcttgtgcttccgggttacaaataccttggacccggcaacggactcgacaagggggagccggtcaacgcagcagacgcggcggccctcgagcacgacaaggcctacgaccagcagctcaaggccggagacaacccgtacctcaagtacaaccacgccgacgccgagttccaggagcggctcaaagaagatacgtcttttgggggcaacctcgggcgagcagtcttccaggccaaaaagaggcttcttgaacctcttggtctggttgaggaagcggctaagacggctcctggaaagaagaggcctgtagagcagtctcctcaggaaccggactcctccgcgggtattggcaaatcgggtgcacagcccgctaaaaagagactcaatttcggtcagactggcgacacagagtcagtcccagaccctcaaccaatcggagaacctcccgcagccccctcaggtgtgggatctcttacaatggcttcaggtggtggcgcaccagtggcagacgataacgaaggtgccgatggagtgggtagttcctcgggaaattggcattgcgattcccaatggctgggggacagagtcatcaccaccagcacccgaacctgggccctgcccacctacaacaatcacctctacaagcaaatctccaacagcacatctggaggatcttcaaatgacaacgcctacttcggctacagcaccccctgggggtattttgacttcaacagattccactgccacttctcaccacgtgactggcagcgactcatcaacaacaactggggattccggcctaagcgactcaacttcaagctcttcaacattcaggtcaaagaggttacggacaacaatggagtcaagaccatcgccaataaccttaccagcacggtccaggtcttcacggactcagactatcagctcccgtacgtgctcgggtcggctcacgagggctgcctcccgccgttcccagcggacgttttcatgattcctcagtacgggtatctgacgcttaatgatggaagccaggccgtgggtcgttcgtccttttactgcctggaatatttcccgtcgcaaatgctaagaacgggtaacaacttccagttcagctacgagtttgagaacgtacctttccatagcagctacgctcacagccaaagcctggaccgactaatgaatccactcatcgaccaatacttgtactatctctcaaagactattaacggttctggacagggccaacaaacgctaaaattcagtgtggccggacccagcaacatggctgtccagggaagaaactacatacctggacccagctaccgacaacaacgtgtctcaaccactgtgacttttaacaacaacagcgaatttgcttggcctggagcttcttcttgggctctcaatggacgtaatagcttgatgaatcctggacctgctatggccagccacaaagaaggagaggaccgtttctttcctttgtctggatctttaatttttggcaaacaaggaactggaagagacaacgtggatgcggacaaagtcatgataaccaacgaagaagaaattaaaactactaacccggtagcaacggagtcctatggacaagtggccacaaaccaccagagtgcccgggcacaggcgcagaccggctgggttcaaaaccaaggaatacttccgggtatggtttggcaggacagagatgtgtacctgcaaggacccatttgggccaaaattcctcacacggacggcaactttcacccttctccgctgatgggagggtttggaatgaagcacccgcctcctcagatcctcatcaaaaacacacctgtacctgcggatcctccaacggccttcaacaagggcaagctgaactctttcatcacccagtattctactggccaagtcagcgtggagatcgagtgggagctgcagaaggaaaacagcaagcgctggaacccggagatccagtacacttccaactattacaagtctaataatgttgaatttgctgttaatactgaaggtgtatatagtgaaccccgccccattggcaccagatacctgactcgtaatctg

SEQ ID NO: 1132 - protein, 736 aa, synthetic construct
  REGION 1..736: note = Adeno Associated Virus Capsid Protein Variant
MAADGYLPDWLEDNLSEGIREWWALKPGAPQPKANQQHQDNARGLVLPGYKYLGPGNGLDKGEPVNAADAAALEHDKAYDQQLKAGDNPYLKYNHADAEFQERLKEDTSFGGNLGRAVFQAKKRLLEPLGLVEEAAKTAPGKKRPVEQSPQEPDSSAGIGKSGAQPAKKRLNFGQTGDTESVPDPQPIGEPPAAPSGVGSLTMASGGGAPVADDNEGADGVGSSSGNWHCDSQWLGDRVITTSTRTWALPTYNNHLYKQISNSTSGGSSNDNAYFGYSTPWGYFDFNRFHCHFSPRDWQRLINNNWGFRPKRLNFKLFNIQVKEVTDNNGVKTIANNLTSTVQVFTDSDYQLPYVLGSAHEGCLPPFPADVFMIPQYGYLTLNDGSQAVGRSSFYCLEYFPSQMLRTGNNFQFSYEFENVPFHSSYAHSQSLDRLMNPLIDQYLYYLSKTINGSGQGQQTLKFSVAGPSNMAVQGRNYIPGPSYRQQRVSTTVTFNNNSEFAWPGASSWALNGRNSLMNPGPAMASHKEGEDRFFPLSGSLIFGKQGTGRDNVDADKVMITNEEEIKTTNPVATESYGQVATNHQSARAQAQTGWVQNQGILPGMVWQDRDVYLQGPIWAKIPHTDGNFHPSPLMGGFGMKHPPPQILIKNTPVPADPPTAFNKGKLNSFITQYSTGQVSVEIEWELQKENSKRWNPEIQYTSNYYKSNNVEFAVNTEGVYSEPRPIGTRYLTRNL

SEQ ID NO: 1133 - DNA, 2208 bp, synthetic construct
  misc_feature 1..2208: note = Adeno Associated Virus Capsid Protein Variant
  source 1..2208: mol_type = other DNA
atggctgccgatggttatcttccagattggctcgaggacaaccttagtgaaggaattcgcgagtggtgggctttgaaacctggagcccctcaacccaaggcaaatcaacaacatcaagacaacgctcgaggtcttgtgcttccgggttacaaataccttggacccggcaacggactcgacaagggggagccggtcaacgcagcagacgcggcggccctcgagcacgacaaggcctacgaccagcagctcaaggccggagacaacccgtacctcaagtacaaccacgccgacgccgagttccaggagcggctcaaagaagatacgtcttttgggggcaacctcgggcgagcagtcttccaggccaaaaagaggcttcttgaacctcttggtctggttgaggaagcggctaagacggctcctggaaagaagaggcctgtagagcagtctcctcaggaaccggactcctccgcgggtattggcaaatcgggtgcacagcccgctaaaaagagactcaatttcggtcagactggcgacacagagtcagtcccagaccctcaaccaatcggagaacctcccgcagccccctcaggtgtgggatctcttacaatggcttcaggtggtggcgcaccagtggcagacaataacgaaggtgccgatggagtgggtagttcctcgggaaattggcattgcgattcccaatggctgggggacagagtcatcaccaccagcacccgaacctgggccctgcccacctacaacaatcacctctacaagcaaatctccaacagcacatctggaggatcttcaaatgacaacgcctacttcggctacagcaccccctgggggtattttgacttcaacagattccactgccacttctcaccacgtgactggcagcgactcatcaacaacaactggggattccggcctaagcgactcaacttcaagctcttcaacgttcaggtcaaagaggttacggacaacaatggagtcaagaccatcgccaataaccttaccagcacggtccaggtcttcacggactcagactatcagctcccgtacgtgctcgggtcggctcacgagggctgcctcccgccgttcccagcggacgttttcatgattcctcagtacgggtatctgacgcttaatgatggaagccaggccgtgggtcgttcgtccttttactgcctggaatatttcccgtcgcaaatgctaagaacgggtaacaacttccagttcagctacgagtttgagaacgtacctttccatagcagctacgctcacagccaaagcctggaccgactaatgaatccactcatcgaccaatacttgtactatctctcaaagactattaacggttctggacagggccaacaaacgctaaaattcagtgtggccggacccagcaacatggctgtccagggaagaaactacatacctggacccagctaccgacaacaacgtgtctcaaccactgtgacttttaacaacaacagcgaatttgcttggcctggagcttcttcttgggctctcaatggacgtaatagcttgatgaatcctggacctgctatggccagccacaaagaaggagaggaccgtttctttcctttgtctggatctttaatttttggcaaacaaggaactggaagagacaacgtggatgcggacaaagtcatgataaccaacgaagaagaaattaaaactactaacccggtagcaacggagtcctatggacaagtggccacaaaccaccagagtgcccgggcacaggcgcagaccggctgggttcaaaaccaaggaatacttccgggtatggtttggcaggacagagatgtgtacctgcaaggacccatttgggccaaaattcctcacacggacggcaactttcacccttctccgctgatgggagggtttggaatgaagcacccgcctcctcagatcctcatcaaaaacacacctgtacctgcggatcctccaacggccttcaacaagggcaagctgaactctttcatcacccagtattctactggccaagtcagcgtggagatcgagtgggagctgcagaaggaaaacagcaagcgctggaacccggagatccagtacacttccaactattacaagtctaataatgttgaatttgctgttaatactgaaggtgtatatagtgaaccccgccccattggcaccagatacctgactcgtaatctg

SEQ ID NO: 1134 - protein, 736 aa, synthetic construct
  REGION 1..736: note = Adeno Associated Virus Capsid Protein Variant
MAADGYLPDWLEDNLSEGIREWWALKPGAPQPKANQQHQDNARGLVLPGYKYLGPGNGLDKGEPVNAADAAALEHDKAYDQQLKAGDNPYLKYNHADAEFQERLKEDTSFGGNLGRAVFQAKKRLLEPLGLVEEAAKTAPGKKRPVEQSPQEPDSSAGIGKSGAQPAKKRLNFGQTGDTESVPDPQPIGEPPAAPSGVGSLTMASGGGAPVADNNEGADGVGSSSGNWHCDSQWLGDRVITTSTRTWALPTYNNHLYKQISNSTSGGSSNDNAYFGYSTPWGYFDFNRFHCHFSPRDWQRLINNNWGFRPKRLNFKLFNVQVKEVTDNNGVKTIANNLTSTVQVFTDSDYQLPYVLGSAHEGCLPPFPADVFMIPQYGYLTLNDGSQAVGRSSFYCLEYFPSQMLRTGNNFQFSYEFENVPFHSSYAHSQSLDRLMNPLIDQYLYYLSKTINGSGQGQQTLKFSVAGPSNMAVQGRNYIPGPSYRQQRVSTTVTFNNNSEFAWPGASSWALNGRNSLMNPGPAMASHKEGEDRFFPLSGSLIFGKQGTGRDNVDADKVMITNEEEIKTTNPVATESYGQVATNHQSARAQAQTGWVQNQGILPGMVWQDRDVYLQGPIWAKIPHTDGNFHPSPLMGGFGMKHPPPQILIKNTPVPADPPTAFNKGKLNSFITQYSTGQVSVEIEWELQKENSKRWNPEIQYTSNYYKSNNVEFAVNTEGVYSEPRPIGTRYLTRNL

SEQ ID NO: 1135 - DNA, 357 bp, synthetic construct
  misc_feature 1..357: note = Adeno Associated Virus MAAP Protein Variant
  source 1..357: mol_type = other DNA
ctggagcccctcaacccaaggcaaatcaacaacatcaagacaacgctcgaggtcttgtgcttccgggttacaaataccttggacccggcaacggactcgacaagggggagccggtcaacgcagcagacgcggcggccctcgagcacgacaaggcctacgaccagcagctcaaggccggagacaacccgtacctcaagtacaaccacgccgacgccgagttccaggagcggctcaaagaagatacgtcttttgggggcaacctcgggcgagcagtcttccaggccaaaaagaggcttcttgaacctcttggtctggttgaggaagcggctaagacggctcctggaaagaagaggcctg

SEQ ID NO: 1136 - protein, 119 aa, synthetic construct
  REGION 1..119: note = Adeno Associated Virus MAAP Protein Variant
LEPLNPRQINNIKTTLEVLCFRVTNTLDPATDSTRGSRSTQQTRRPSSTTRPTTSSSRPETTRTSSTTTPTPSSRSGSKKIRLLGATSGEQSSRPKRGFLNLLVWLRKRLRRLLERRGL

SEQ ID NO: 1137 - DNA, 357 bp, synthetic construct
  misc_feature 1..357: note = Adeno Associated Virus MAAP Protein Variant
  source 1..357: mol_type = other DNA
ctggagcccctcaacccaaggcaaatcaacaacatcaagacaacgctcgaggtcttgtgcttccgggttacaaataccttggacccggcaacggactcgacaagggggagccggtcaacgcagcagacgcggcggccctcgagcacgacaaggcctacgaccagcagctcaaggccggagacaacccgtacctcaagtacaaccacgccgacgccgagttccaggagcggctcaaagaagatacgtcttttgggggcaacctcgggcgagcagtcttccaggccaaaaagaggctgcttgaacctcttggtctggttgaggaagcggctaagacggctcctggaaagaagaggcctg

SEQ ID NO: 1138 - protein, 119 aa, synthetic construct
  REGION 1..119: note = Adeno Associated Virus MAAP Protein Variant
LEPLNPRQINNIKTTLEVLCFRVTNTLDPATDSTRGSRSTQQTRRPSSTTRPTTSSSRPETTRTSSTTTPTPSSRSGSKKIRLLGATSGEQSSRPKRGCLNLLVWLRKRLRRLLERRGL

SEQ ID NO: 1139 - DNA, 357 bp, synthetic construct
  misc_feature 1..357: note = Adeno Associated Virus MAAP Protein Variant
  source 1..357: mol_type = other DNA
ctggagcccctcaacccaaggcaaatcaacaacatcaagacaacgctcgaggtcttgtgcttccgggttacaaataccttggaccctttaacggactcgacaagggggagccggtcaacgcagcagacgcggcggccctcgagcacgacaaggcctacgaccagcagctcaaggccggagacaacccgtacctcaagtacaaccacgccgacgccgagttccaggagcggctcaaagaagatacgtcttttgggggcaacctcgggcgagcagtcttccaggccaaaaagaggcttcttgaacctcttggtctggttgaggaagcggctaagacggctcctggaaagaagaggcctg

SEQ ID NO: 1140 - protein, 119 aa, synthetic construct
  REGION 1..119: note = Adeno Associated Virus MAAP Protein Variant
LEPLNPRQINNIKTTLEVLCFRVTNTLDPLTDSTRGSRSTQQTRRPSSTTRPTTSSSRPETTRTSSTTTPTPSSRSGSKKIRLLGATSGEQSSRPKRGFLNLLVWLRKRLRRLLERRGL

SEQ ID NO: 1141 - DNA, 357 bp, synthetic construct
  misc_feature 1..357: note = Adeno Associated Virus MAAP Protein Variant
  source 1..357: mol_type = other DNA
ctggagcccctcaacccaaggcaaatcaacaacatcaagacaacgctcgaggtcttgtgcttccgggttacaaataccttggacccggtaacggactcgacaagggggagccggtcaacgcagcagacgcggcggccctcgagcacgacaaggcctacgaccagcagctcaaggccggagacaacccgtacctcaagtacaaccacgccgacgccgagttccaggagcggctcaaagaagatacgtcttttgggggcaacctcgggcgagcagtcttccaggccaaaaagaggcttcttgaacctcttggtctggttgaggaagcggctaagacggctcctggaaagaagaggcctg

SEQ ID NO: 1142 - protein, 119 aa, synthetic construct
  REGION 1..119: note = Adeno Associated Virus MAAP Protein Variant
LEPLNPRQINNIKTTLEVLCFRVTNTLDPVTDSTRGSRSTQQTRRPSSTTRPTTSSSRPETTRTSSTTTPTPSSRSGSKKIRLLGATSGEQSSRPKRGFLNLLVWLRKRLRRLLERRGL

SEQ ID NO: 1143 - DNA, 357 bp, synthetic construct
  misc_feature 1..357: note = Adeno Associated Virus MAAP Protein Variant
  source 1..357: mol_type = other DNA
ctggagcccctcaacccaaggcaaatcaacaacatcaagacaacgctcgaggtcttgtgcttccgggttacaaataccttggacccggcaacggactcgacaagggggagccggtcaacgcagcagacgcggcggccctcgagcacgacaaggcctacgaccagcagctcaaggccggagacaacccgtacctcaagtacaaccacgccgacgccgagttccaggagcggctcaaagaagatacgtcttttgggggcaacctcgggcgagcagtcttccaggccaaaaagagggtgcttgaacctcttggtctggttgaggaagcggctaagacggctcctggaaagaagaggcctg

SEQ ID NO: 1144 - protein, 119 aa, synthetic construct; identical to SEQ ID NO: 1138
  REGION 1..119: note = Adeno Associated Virus MAAP Protein Variant

SEQ ID NO: 1145 - DNA, 357 bp, synthetic construct
  misc_feature 1..357: note = Adeno Associated Virus MAAP Protein Variant
  source 1..357: mol_type = other DNA
ctggagcccctcaacccaaggcaaatcaacaacatcaagacaacgctcggggtcttgtgcttccgggttacaaataccttggacccggcaacggactcgacaagggggagccggtcaacgcagcagacgcggcggccctcgagcacgacaaggcctacgaccagcagctcaaggccggagacaacccgtacctcaagtacaaccacgccgacgccgagttccaggagcggctcaaagaagatacgtcttttgggggcaacctcgggcgagcagtcttccaggccaaaaagaggcttcttgaacctcttggtctggttgaggaagcggctaagacggctcctggaaagaagaggcctg

SEQ ID NO: 1146 - protein, 119 aa, synthetic construct
  REGION 1..119: note = Adeno Associated Virus MAAP Protein Variant
LEPLNPRQINNIKTTLGVLCFRVTNTLDPATDSTRGSRSTQQTRRPSSTTRPTTSSSRPETTRTSSTTTPTPSSRSGSKKIRLLGATSGEQSSRPKRGFLNLLVWLRKRLRRLLERRGL

SEQ ID NO: 1147 - DNA, 357 bp, synthetic construct
  misc_feature 1..357: note = Adeno Associated Virus MAAP Protein Variant
  source 1..357: mol_type = other DNA
ctggagcccctcaacccaaggcaaatcaacaacatcaagacaacgctcgaggtcttgtgcttccgggttacaaataccttggacccggcaacggactcgacaagggggagccggtcaacgcagcagacgcggcggccctcgagcacgacaaggcctacgaccagcagctcaaggccggagacaacccgtacctcaagtacaaccacgccgacgccgagttccaggagcggctcaaagaagatacgtcttttgggggcaacctcgggcgagcagtctcccaggccaaaaagaggcttcttgaacctcttggtctggttgaggaagcggctaagacggctcctggaaagaagaggcctg

SEQ ID NO: 1148 - protein, 119 aa, synthetic construct
  REGION 1..119: note = Adeno Associated Virus MAAP Protein Variant
LEPLNPRQINNIKTTLEVLCFRVTNTLDPATDSTRGSRSTQQTRRPSSTTRPTTSSSRPETTRTSSTTTPTPSSRSGSKKIRLLGATSGEQSPRPKRGFLNLLVWLRKRLRRLLERRGL

SEQ ID NO: 1149 - DNA, 357 bp, synthetic construct
  misc_feature 1..357: note = Adeno Associated Virus MAAP Protein Variant
  source 1..357: mol_type = other DNA
ctggagcccctcaacccaaggcaaatcaacaacatcaagacaacgctcgaggtcttgtgcttccgggttacaaataccttggacccggcaacggactcgacaagggggagccggtcaacgcagcagacgcggcggccctcgagcacgacaaggcctacgaccagcagctcaaggccggagacaacccgtacctcaagtacaaccacgccgacgccgagttccaggagcggctcaaagaagatacgtcttttgggggcaacctcgggcgagcagtcttccaggccaaaaagaggcttcttgaacctcttggtctggttgaggaagcggctaagacggctcctggaaacaagaggcctg

SEQ ID NO: 1150 - protein, 119 aa, synthetic construct
  REGION 1..119: note = Adeno Associated Virus MAAP Protein Variant
LEPLNPRQINNIKTTLEVLCFRVTNTLDPATDSTRGSRSTQQTRRPSSTTRPTTSSSRPETTRTSSTTTPTPSSRSGSKKIRLLGATSGEQSSRPKRGFLNLLVWLRKRLRRLLETRGL

SEQ ID NO: 1151 - DNA, 357 bp, synthetic construct
  misc_feature 1..357: note = Adeno Associated Virus MAAP Protein Variant
  source 1..357: mol_type = other DNA
ctggagcccctcaacccaaggcaaatcaacaacatcaagacaacgctcgaggtcttgtgcttccgggttacaaataccttggacccggcaacggactcgacaagggggagccggtcaacgcagcagacgcggcggccctcgagcacgacaaggcctacgaccagcagctcaaggccggagacaacccgtacctcaagtacaaccacgccgacgccgagttcgaggagcggctcaaagaagatacgtcttttgggggcaacctcgggcgagcagtcttccaggccaaaaagaggcttcttgaacctcttggtctggttgaggaagcggctaagacggctcctggaaagaagaggcctg

SEQ ID NO: 1152 - protein, 119 aa, synthetic construct; identical to SEQ ID NO: 1136
  REGION 1..119: note = Adeno Associated Virus MAAP Protein Variant

SEQ ID NO: 1153 - DNA, 78 bp, synthetic construct
  misc_feature 1..78: note = Adeno Associated Virus MAAP Protein Variant
  source 1..78: mol_type = other DNA
ctggagcccctcaacccaaggcaaatcaacaacatcaagacaacgctcgaggtcttgtgcttccgggttacaaatacc

SEQ ID NO: 1154 - protein, 26 aa, synthetic construct
  REGION 1..26: note = Adeno Associated Virus MAAP Protein Variant
LEPLNPRQINNIKTTLEVLCFRVTNT

SEQ ID NO: 1155 - DNA, 357 bp, synthetic construct
  misc_feature 1..357: note = Adeno Associated Virus MAAP Protein Variant
  source 1..357: mol_type = other DNA
ctggagcccctcaacccaaggcaaatcaacaacatcaagacaacgctcgaggtcttgtgcttccgggttacaaataccttggacccggcaacggactcgacaagggggagccggtcaacgcagcagacgcggcggccctcgagcacgacaaggcctacgaccagcagctcaaggccggagacaacccgtacctcaagtacaaccacgccgacgccgagactcaggagcggctcaaagaagatacgtcttttgggggcaacctcgggcgagcagtcttccaggccaaaaagaggcttcttgaacctcttggtctggttgaggaagcggctaagacggctcctggaaagaagaggcctg

SEQ ID NO: 1156 - protein, 119 aa, synthetic construct
  REGION 1..119: note = Adeno Associated Virus MAAP Protein Variant
LEPLNPRQINNIKTTLEVLCFRVTNTLDPATDSTRGSRSTQQTRRPSSTTRPTTSSSRPETTRTSSTTTPTPRLRSGSKKIRLLGATSGEQSSRPKRGFLNLLVWLRKRLRRLLERRGL

SEQ ID NO: 1157 - DNA, 357 bp, synthetic construct
  misc_feature 1..357: note = Adeno Associated Virus MAAP Protein Variant
  source 1..357: mol_type = other DNA
ctggagcccctctacccaaggcaaatcaacaacatcaagacaacgctcgaggtcttgtgcttccgggttacaaataccttggacccggcaacggactcgacaagggggagccggtcaacgcagcagacgcggcggccctcgagcacgacaaggcctacgaccagcagctcaaggccggagacaacccgtacctcaagtacaaccacgccgacgccgagttccaggagcggctcaaagaagatacgtcttttgggggcaacctcgggcgagcagtcttccaggccaaaaagaggcttcttgaacctcttggtctggttgaggaagcggctaagacggctcctggaaagaagaggcctg

SEQ ID NO: 1158 - protein, 119 aa, synthetic construct
  REGION 1..119: note = Adeno Associated Virus MAAP Protein Variant
LEPLYPRQINNIKTTLEVLCFRVTNTLDPATDSTRGSRSTQQTRRPSSTTRPTTSSSRPETTRTSSTTTPTPSSRSGSKKIRLLGATSGEQSSRPKRGFLNLLVWLRKRLRRLLERRGL

SEQ ID NO: 1159 - DNA, 357 bp, synthetic construct
  misc_feature 1..357: note = Adeno Associated Virus MAAP Protein Variant
  source 1..357: mol_type = other DNA
ctggagcccctcaacccaaggcaaatcaacaacatcaagacaacgctcgaggtcttgtgcttccgggttacaaataccttggacccggcaacggactcgacaagggggagccggtcaacgcagcagacgcggcggccctcgagcacgacaaggcctacgaccagcagctcaaggccggagacaacccgtacctcaagtacaaccacgccgacgccgagttccgagagcggctcaaagaagatacgtcttttgggggcaacctcgggcgagcagtcttccaggccaaaaagaggcttcttgaacctcttggtctggttgaggaagcggctaagacggctcctggaaagaagaggcctg

SEQ ID NO: 1160 - protein, 119 aa, synthetic construct
  REGION 1..119: note = Adeno Associated Virus MAAP Protein Variant
LEPLNPRQINNIKTTLEVLCFRVTNTLDPATDSTRGSRSTQQTRRPSSTTRPTTSSSRPETTRTSSTTTPTPSSESGSKKIRLLGATSGEQSSRPKRGFLNLLVWLRKRLRRLLERRGL

SEQ ID NO: 1161 - DNA, 357 bp, synthetic construct
  misc_feature 1..357: note = Adeno Associated Virus MAAP Protein Variant
  source 1..357: mol_type = other DNA
ctggagcccctcaacccaaggcaaatcaacaacatcaagacaacgctcgaggtcttgtgcttccgggttacaaataccttggacccggcaacggactcgacaagggggagccggtcaacgcagcagacgcggcggccctcgagcacgacaaggcctacgaccagcagctcaaggccggagacaacccgtacctcaagtacaaccacgccgacgccgagttcgtggagcggctcaaagaagatacgtcttttgggggcaacctcgggcgagcagtcttccaggccaaaaagaggcttcttgaacctcttggtctggttgaggaagcggctaagacggctcctggaaagaagaggcctg

SEQ ID NO: 1162 - protein, 119 aa, synthetic construct
  REGION 1..119: note = Adeno Associated Virus MAAP Protein Variant
LEPLNPRQINNIKTTLEVLCFRVTNTLDPATDSTRGSRSTQQTRRPSSTTRPTTSSSRPETTRTSSTTTPTPSSWSGSKKIRLLGATSGEQSSRPKRGFLNLLVWLRKRLRRLLERRGL

SEQ ID NO: 1163 - DNA, 357 bp, synthetic construct
  misc_feature 1..357: note = Adeno Associated Virus MAAP Protein Variant
  source 1..357: mol_type = other DNA
ctggagcccctcaacccttggcaaatcaacaacatcaagacaacgctcgaggtcttgtgcttccgggttacaaataccttggacccggcaacggactcgacaagggggagccggtcaacgcagcagacgcggcggccctcgagcacgacaaggcctacgaccagcagctcaaggccggagacaacccgtacctcaagtacaaccacgccgacgccgagttccaggagcggctcaaagaagatacgtcttttgggggcaacctcgggcgagcagtcttccaggccaaaaagaggcttcttgaacctcttggtctggttgaggaagcggctaagacggctcctggaaagaagaggcctg

SEQ ID NO: 1164 - protein, 119 aa, synthetic construct
  REGION 1..119: note = Adeno Associated Virus MAAP Protein Variant
LEPLNPWQINNIKTTLEVLCFRVTNTLDPATDSTRGSRSTQQTRRPSSTTRPTTSSSRPETTRTSSTTTPTPSSRSGSKKIRLLGATSGEQSSRPKRGFLNLLVWLRKRLRRLLERRGL

SEQ ID NO: 1165 - DNA, 357 bp, synthetic construct
  misc_feature 1..357: note = Adeno Associated Virus MAAP Protein Variant
  source 1..357: mol_type = other DNA
ctggagcccctcaacccaaggcaaatcaacaacatcaagacaacgctcgaggtcttgtgcttccgggttacaaataccttggacccggcaacggactcgacaagggggagccggtcaacgcagcagacgcggcggccctcgagcacgacaaggcctacgaccagcagctcaaggccggagacaacccgtacctcaagtacaaccacgccgacgccgagctccaggagcggctcaaagaagatacgtcttttgggggcaacctcgggcgagcagtcttccaggccaaaaagaggcttcttgaacctcttggtctggttgaggaagcggctaagacggctcctggaaagaagaggcctg

SEQ ID NO: 1166 - protein, 119 aa, synthetic construct; identical to SEQ ID NO: 1136
  REGION 1..119: note = Adeno Associated Virus MAAP Protein Variant

SEQ ID NO: 1167 - DNA, 357 bp, synthetic construct
  misc_feature 1..357: note = Adeno Associated Virus MAAP Protein Variant
  source 1..357: mol_type = other DNA
ctggagcccctcaaccccgcgcaaatcaacaacatcaagacaacgctcgaggtcttgtgcttccgggttacaaataccttggacccggcaacggactcgacaagggggagccggtcaacgcagcagacgcggcggccctcgagcacgacaaggcctacgaccagcagctcaaggccggagacaacccgtacctcaagtacaaccacgccgacgccgagttccaggagcggctcaaagaagatacgtcttttgggggcaacctcgggcgagcagtcttccaggccaaaaagaggcttcttgaacctcttggtctggttgaggaagcggctaagacggctcctggaaagaagaggcctg

SEQ ID NO: 1168 - protein, 119 aa, synthetic construct
  REGION 1..119: note = Adeno Associated Virus MAAP Protein Variant
LEPLNPAQINNIKTTLEVLCFRVTNTLDPATDSTRGSRSTQQTRRPSSTTRPTTSSSRPETTRTSSTTTPTPSSRSGSKKIRLLGATSGEQSSRPKRGFLNLLVWLRKRLRRLLERRGL

SEQ ID NO: 1169 - DNA, 357 bp, synthetic construct
  misc_feature 1..357: note = Adeno Associated Virus MAAP Protein Variant
  source 1..357: mol_type = other DNA
ctggagcccctcaacccggggcaaatcaacaacatcaagacaacgctcgaggtcttgtgcttccgggttacaaataccttggacccggcaacggactcgacaagggggagccggtcaacgcagcagacgcggcggccctcgagcacgacaaggcctacgaccagcagctcaaggccggagacaacccgtacctcaagtacaaccacgccgacgccgagttccaggagcggctcaaagaagatacgtcttttgggggcaacctcgggcgagcagtcttccaggccaaaaagaggcttcttgaacctcttggtctggttgaggaagcggctaagacggctcctggaaagaagaggcctg

SEQ ID NO: 1170 - protein, 119 aa, synthetic construct
  REGION 1..119: note = Adeno Associated Virus MAAP Protein Variant
LEPLNPGQINNIKTTLEVLCFRVTNTLDPATDSTRGSRSTQQTRRPSSTTRPTTSSSRPETTRTSSTTTPTPSSRSGSKKIRLLGATSGEQSSRPKRGFLNLLVWLRKRLRRLLERRGL

SEQ ID NO: 1171 - DNA, 357 bp, synthetic construct
  misc_feature 1..357: note = Adeno Associated Virus MAAP Protein Variant
  source 1..357: mol_type = other DNA
ctggagcccctcaacccaaggcaaatcaacaacatcaagacaacgctcgaggtcttgtgcttccgggttacgaataccttggacccggcaacggactcgacaagggggagccggtcaacgcagcagacgcggcggccctcgagcacgacaaggcctacgaccagcagctcaaggccggagacaacccgtacctcaagtacaaccacgccgacgccgagttccaggagcggctcaaagaagatacgtcttttgggggcaacctcgggcgagcagtcttccaggccaaaaagaggcttcttgaacctcttggtctggttgaggaagcggctaagacggctcctggaaagaagaggcctg

SEQ ID NO: 1172 - protein, 119 aa, synthetic construct; identical to SEQ ID NO: 1136
  REGION 1..119: note = Adeno Associated Virus MAAP Protein Variant

SEQ ID NO: 1173 - DNA, 357 bp, synthetic construct
  misc_feature 1..357: note = Adeno Associated Virus MAAP Protein Variant
  source 1..357: mol_type = other DNA
ctggagcccctcaacccaaggcaaatcaacaacatcaagacaacgctcgaggttttgtgcttccgggttacaaataccttggacccggcaacggactcgacaagggggagccggtcaacgcagcagacgcggcggccctcgagcacgacaaggcctacgaccagcagctcaaggccggagacaacccgtacctcaagtacaaccacgccgacgccgagttccaggagcggctcaaagaagatacgtcttttgggggcaacctcgggcgagcagtcttccaggccaaaaagaggcttcttgaacctcttggtctggttgaggaagcggctaagacggctcctggaaagaagaggcctg

SEQ ID NO: 1174 - protein, 119 aa, synthetic construct; identical to SEQ ID NO: 1136
  REGION 1..119: note = Adeno Associated Virus MAAP Protein Variant

SEQ ID NO: 1175 - DNA, 357 bp, synthetic construct
  misc_feature 1..357: note = Adeno Associated Virus MAAP Protein Variant
  source 1..357: mol_type = other DNA
ctggagcccctcaacccaaggcaaatcaacaacatcaagacaacgctcgaggtcttgtgcttccgggttacaaataccttggacccggcaacggactcgacaaggggcagccggtcaacgcagcagacgcggcggccctcgagcacgacaaggcctacgaccagcagctcaaggccggagacaacccgtacctcaagtacaaccacgccgacgccgagttccaggagcggctcaaagaagatacgtcttttgggggcaacctcgggcgagcagtcttccaggccaaaaagaggcttcttgaacctcttggtctggttgaggaagcggctaagacggctcctggaaagaagaggcctg

SEQ ID NO: 1176 - protein, 119 aa, synthetic construct; identical to SEQ ID NO: 1136
  REGION 1..119: note = Adeno Associated Virus MAAP Protein Variant

SEQ ID NO: 1177 - DNA, 357 bp, synthetic construct
  misc_feature 1..357: note = Adeno Associated Virus MAAP Protein Variant
  source 1..357: mol_type = other DNA
ctggagcccctcaacccaaggcaaatcaacaacatcaagacaacgctcgaggtcttgtgcttccgggttacaaataccttggacccggcaacggactcagtaagggggagccggtcaacgcagcagacgcggcggccctcgagcacgacaaggcctacgaccagcagctcaaggccggagacaacccgtacctcaagtacaaccacgccgacgccgagttccaggagcggctcaaagaagatacgtcttttgggggcaacctcgggcgagcagtcttccaggccaaaaagaggcttcttgaacctcttggtctggttgaggaagcggctaagacggctcctggaaagaagaggcctg

SEQ ID NO: 1178 - protein, 119 aa, synthetic construct
  REGION 1..119: note = Adeno Associated Virus MAAP Protein Variant
LEPLNPRQINNIKTTLEVLCFRVTNTLDPATDSVRGSRSTQQTRRPSSTTRPTTSSSRPETTRTSSTTTPTPSSRSGSKKIRLLGATSGEQSSRPKRGFLNLLVWLRKRLRRLLERRGL

SEQ ID NO: 1179 - DNA, 357 bp, synthetic construct
  misc_feature 1..357: note = Adeno Associated Virus MAAP Protein Variant
  source 1..357: mol_type = other DNA
ctggagcccctcaacccaaggcaaatcaacaacatcaagacaacgctcgaggtcttgtgcttccgggttacaaataccttggacccggcaacggactcgacaagggggagccggtcaacgcagcagacgcggcggccctcgagcacgacaaggcccacgaccagcagctcaaggccggagacaacccgtacctcaagtacaaccacgccgacgccgagttccaggagcggctcaaagaagatacgtcttttgggggcaacctcgggcgagcagtcttccaggccaaaaagaggcttcttgaacctcttggtctggttgaggaagcggctaagacggctcctggaaagaagaggcctg

SEQ ID NO: 1180 - protein, 119 aa, synthetic construct; identical to SEQ ID NO: 1136
  REGION 1..119: note = Adeno Associated Virus MAAP Protein Variant

SEQ ID NO: 1181 - DNA, 357 bp, synthetic construct
  misc_feature 1..357: note = Adeno Associated Virus MAAP Protein Variant
  source 1..357: mol_type = other DNA
ctggagcccctcaacccaaggcaaatcaacaacatcaagacaacgctcgaggtcttgtgcttccgggttacaaataccttggacccggcaacggactcgacaagggggagccggtcaacgcagcagacgcggcggccctcgagcacgacaaggcctacgacgagcagctcaaggccggagacaacccgtacctcaagtacaaccacgccgacgccgagttccaggagcggctcaaagaagatacgtcttttgggggcaacctcgggcgagcagtcttccaggccaaaaagaggcttcttgaacctcttggtctggttgaggaagcggctaagacggctcctggaaagaagaggcctg

SEQ ID NO: 1182 - protein, 119 aa, synthetic construct; identical to SEQ ID NO: 1136
  REGION 1..119: note = Adeno Associated Virus MAAP Protein Variant

SEQ ID NO: 1183 - DNA, 357 bp, synthetic construct
  misc_feature 1..357: note = Adeno Associated Virus MAAP Protein Variant
  source 1..357: mol_type = other DNA
ctggagcccctcaacccaaggcaaatcaacaacatcaagacaacgctcgaggtcttgtgcttccgggttacaaataccttggacccggcaacggactcgacaagggggagccggtcaacgcagcagacgcggcggccctcgagcacgacaaggcctacgaccagcagctcaaggccggagacaacccgtacctcaagtacaaccacgccgacgccgagcctcaggagcggctcaaagaagatacgtcttttgggggcaacctcgggcgagcagtcttccaggccaaaaagaggcttcttgaacctcttggtctggttgaggaagcggctaagacggctcctggaaagaagaggcctg

SEQ ID NO: 1184 - protein, 119 aa, synthetic construct
  REGION 1..119: note = Adeno Associated Virus MAAP Protein Variant
LEPLNPRQINNIKTTLEVLCFRVTNTLDPATDSTRGSRSTQQTRRPSSTTRPTTSSSRPETTRTSSTTTPTPSLRSGSKKIRLLGATSGEQSSRPKRGFLNLLVWLRKRLRRLLERRGL

SEQ ID NO: 1185 - DNA, 357 bp, synthetic construct
  misc_feature 1..357: note = Adeno Associated Virus MAAP Protein Variant
  source 1..357: mol_type = other DNA
ctggagcccctcaacccaaggcaaatcaacaacatcaagacaacgctcgaggtcttgtgcttccgggttacaaataccttggacccggcaacggactcaagaagggggagccggtcaacgcagcagacgcggcggccctcgagcacgacaaggcctacgaccagcagctcaaggccggagacaacccgtacctcaagtacaaccacgccgacgccgagttccaggagcggctcaaagaagatacgtcttttgggggcaacctcgggcgagcagtcttccaggccaaaaagaggcttcttgaacctcttggtctggttgaggaagcggctaagacggctcctggaaagaagaggcctg

SEQ ID NO: 1186 - protein, 119 aa, synthetic construct
  REGION 1..119: note = Adeno Associated Virus MAAP Protein Variant
LEPLNPRQINNIKTTLEVLCFRVTNTLDPATDSRRGSRSTQQTRRPSSTTRPTTSSSRPETTRTSSTTTPTPSSRSGSKKIRLLGATSGEQSSRPKRGFLNLLVWLRKRLRRLLERRGL

SEQ ID NO: 1187 - DNA, 357 bp, synthetic construct
  misc_feature 1..357: note = Adeno Associated Virus MAAP Protein Variant
  source 1..357: mol_type = other DNA
ctggagcccctcaacccaaggcaaatcaacaacatcaagacaacgctcgaggtcttgtgcttccgggttacaaataccgtggacccggcaacggactcgacaagggggagccggtcaacgcagcagacgcggcggccctcgagcacgacaaggcctacgaccagcagctcaaggccggagacaacccgtacctcaagtacaaccacgccgacgccgagttccaggagcggctcaaagaagatacgtcttttgggggcaacctcgggcgagcagtcttccaggccaaaaagaggcttcttgaacctcttggtctggttgaggaagcggctaagacggctcctggaaagaagaggcctg

SEQ ID NO: 1188 - protein, 119 aa, synthetic construct
  REGION 1..119: note = Adeno Associated Virus MAAP Protein Variant
LEPLNPRQINNIKTTLEVLCFRVTNTVDPATDSTRGSRSTQQTRRPSSTTRPTTSSSRPETTRTSSTTTPTPSSRSGSKKIRLLGATSGEQSSRPKRGFLNLLVWLRKRLRRLLERRGL

SEQ ID NO: 1189 - DNA, 357 bp, synthetic construct
  misc_feature 1..357: note = Adeno Associated Virus MAAP Protein Variant
  source 1..357: mol_type = other DNA
ctggagcccctcaaccctttgcaaatcaacaacatcaagacaacgctcgaggtcttgtgcttccgggttacaaataccttggacccggcaacggactcgacaagggggagccggtcaacgcagcagacgcggcggccctcgagcacgacaaggcctacgaccagcagctcaaggccggagacaacccgtacctcaagtacaaccacgccgacgccgagttccaggagcggctcaaagaagatacgtcttttgggggcaacctcgggcgagcagtcttccaggccaaaaagaggcttcttgaacctcttggtctggttgaggaagcggctaagacggctcctggaaagaagaggcctg

SEQ ID NO: 1190 - protein, 119 aa, synthetic construct
  REGION 1..119: note = Adeno Associated Virus MAAP Protein Variant
LEPLNPLQINNIKTTLEVLCFRVTNTLDPATDSTRGSRSTQQTRRPSSTTRPTTSSSRPETTRTSSTTTPTPSSRSGSKKIRLLGATSGEQSSRPKRGFLNLLVWLRKRLRRLLERRGL

SEQ ID NO: 1191 - DNA, 357 bp, synthetic construct
  misc_feature 1..357: note = Adeno Associated Virus MAAP Protein Variant
  source 1..357: mol_type = other DNA
ctggagcccctcaacccaaggcaaatcaacaacatcaagacaacgctcgaggtcttgtgcttccgggttacaaataccttggacccggcaacggactcgacaagggggagccggtcaacgcagcagacgcggcggccctcgagcacgacaaggcctacgaccagcagctcaaggccggagacaacccgtacctcaagtacaaccacgccgacgccgaggcgcaggagcggctcaaagaagatacgtcttttgggggcaacctcgggcgagcagtcttccaggccaaaaagaggcttcttgaacctcttggtctggttgaggaagcggctaagacggctcctggaaagaagaggcctg

SEQ ID NO: 1192 - protein, 119 aa, synthetic construct
  REGION 1..119: note = Adeno Associated Virus MAAP Protein Variant
LEPLNPRQINNIKTTLEVLCFRVTNTLDPATDSTRGSRSTQQTRRPSSTTRPTTSSSRPETTRTSSTTTPTPRRRSGSKKIRLLGATSGEQSSRPKRGFLNLLVWLRKRLRRLLERRGL

SEQ ID NO: 1193 - DNA, 357 bp, synthetic construct
  misc_feature 1..357: note = Adeno Associated Virus MAAP Protein Variant
  source 1..357: mol_type = other DNA
ctggagcccctcaacccaaggcaaatcaacaacatcaagacaacgctcgaggtcttgtgcttccgggttacaaataccttggacccggcaacggactcgacaagggggagccggtcaacgcagcagacgcggcggccctcgagcacgacaaggcctacgaccagcagctcaaggccggagacaacccgcttctcaagtacaaccacgccgacgccgagttccaggagcggctcaaagaagatacgtcttttgggggcaacctcgggcgagcagtcttccaggccaaaaagaggcttcttgaacctcttggtctggttgaggaagcggctaagacggctcctggaaagaagaggcctg

SEQ ID NO: 1194 - protein, 119 aa, synthetic construct
  REGION 1..119: note = Adeno Associated Virus MAAP Protein Variant
LEPLNPRQINNIKTTLEVLCFRVTNTLDPATDSTRGSRSTQQTRRPSSTTRPTTSSSRPETTRFSSTTTPTPSSRSGSKKIRLLGATSGEQSSRPKRGFLNLLVWLRKRLRRLLERRGL

SEQ ID NO: 1195 - DNA, 357 bp, synthetic construct
  misc_feature 1..357: note = Adeno Associated Virus MAAP Protein Variant
  source 1..357: mol_type = other DNA
ctggagcccctcaacccaaggcaaatcaacaacatcaagacaacgctcgaggtcttgtgcttccgggttacaaataccttggacccggcaacggactcgacaagggggagccggtcaacgcagcagacgcggcggccctcgagcacgacaaggcctacgaccagcagctcaaggccggagacaacccgggtctcaagtacaaccacgccgacgccgagttccaggagcggctcaaagaagatacgtcttttgggggcaacctcgggcgagcagtcttccaggccaaaaagaggcttcttgaacctcttggtctggttgaggaagcggctaagacggctcctggaaagaagaggcctg

SEQ ID NO: 1196 - protein, 119 aa, synthetic construct
  REGION 1..119: note = Adeno Associated Virus MAAP Protein Variant
LEPLNPRQINNIKTTLEVLCFRVTNTLDPATDSTRGSRSTQQTRRPSSTTRPTTSSSRPETTRVSSTTTPTPSSRSGSKKIRLLGATSGEQSSRPKRGFLNLLVWLRKRLRRLLERRGL

SEQ ID NO: 1197 - DNA, 357 bp, synthetic construct
  misc_feature 1..357: note = Adeno Associated Virus MAAP Protein Variant
  source 1..357: mol_type = other DNA
ctggagcccctcaacccaaggcaaatcaacaacatcaagacaacgctcgaggtcttgtgcttccgggttacaaataccttggacccggcaacggactcgacaagggggagccggtcaacgcagcagacgcggcggccctcgagcacgacaaggcctacgaccagcagctcaaggccggagacaacccgtacctcaagtacaaccacgccgacgccgagttctcggagcggctcaaagaagatacgtcttttgggggcaacctcgggcgagcagtcttccaggccaaaaagaggcttcttgaacctcttggtctggttgaggaagcggctaagacggctcctggaaagaagaggcctg

SEQ ID NO: 1198 - protein, 119 aa, synthetic construct; identical to SEQ ID NO: 1136
  REGION 1..119: note = Adeno Associated Virus MAAP Protein Variant

SEQ ID NO: 1199 - DNA, 357 bp, synthetic construct
  misc_feature 1..357: note = Adeno Associated Virus MAAP Protein Variant
  source 1..357: mol_type = other DNA
ctggagcccctcaacccaaggcaaatcaacaacatcaagacaacgctcgaggtcttgtgcttccgggttacaaataccttggacccggcaacggactcgacaagggggagccggtcaacgcagcagacgcggcggccctcgagcacgacaaggcctacgaccagcagctcaaggccggagacaacccgaggctcaagtacaaccacgccgacgccgagttccaggagcggctcaaagaagatacgtcttttgggggcaacctcgggcgagcagtcttccaggccaaaaagaggcttcttgaacctcttggtctggttgaggaagcggctaagacggctcctggaaagaagaggcctg

SEQ ID NO: 1200 - protein, 119 aa, synthetic construct
  REGION 1..119: note = Adeno Associated Virus MAAP Protein Variant
LEPLNPRQINNIKTTLEVLCFRVTNTLDPATDSTRGSRSTQQTRRPSSTTRPTTSSSRPETTRGSSTTTPTPSSRSGSKKIRLLGATSGEQSSRPKRGFLNLLVWLRKRLRRLLERRGL

SEQ ID NO: 1201 - DNA, 357 bp, synthetic construct
  misc_feature 1..357: note = Adeno Associated Virus MAAP Protein Variant
  source 1..357: mol_type = other DNA
ctggagcccctcaacccaaggcaaatcaacaacatcaagacaacgctcgaggtcttgtgcttccgggttacaaataccttggacccggcaacggactcgacaagggggagccggtcaacgcagcagacgcggcggccctcgagcacgacaaggcctacgaccagcagctcaaggccggagacaacccggccctcaagtacaaccacgccgacgccgagttccaggagcggctcaaagaagatacgtcttttgggggcaacctcgggcgagcagtcttccaggccaaaaagaggcttcttgaacctcttggtctggttgaggaagcggctaagacggctcctggaaagaagaggcctg

SEQ ID NO: 1202 - protein, 119 aa, synthetic construct
  REGION 1..119: note = Adeno Associated Virus MAAP Protein Variant
LEPLNPRQINNIKTTLEVLCFRVTNTLDPATDSTRGSRSTQQTRRPSSTTRPTTSSSRPETTRPSSTTTPTPSSRSGSKKIRLLGATSGEQSSRPKRGFLNLLVWLRKRLRRLLERRGL

SEQ ID NO: 1203 - DNA, 357 bp, synthetic construct
  misc_feature 1..357: note = Adeno Associated Virus MAAP Protein Variant
  source 1..357: mol_type = other DNA
ctggagcccctcaacccaaggcaaatcaacaacatcaagacaacgctcgaggtcttgtgcttccgggttacaaataccttggacccggcaacggactcgacaagggggagccggtcaacgcagcagacgcggcggccctcgagcacgacaaggcctacgaccagcagctcaaggccggagacaacccgtacctcaagtacaaccacgccgacgccgagtcccaggagcggctcaaagaagatacgtcttttgggggcaacctcgggcgagcagtcttccaggccaaaaagaggcttcttgaacctcttggtctggttgaggaagcggctaagacggctcctggaaagaagaggcctg

SEQ ID NO: 1204 - protein, 119 aa, synthetic construct
  REGION 1..119: note = Adeno Associated Virus MAAP Protein Variant
LEPLNPRQINNIKTTLEVLCFRVTNTLDPATDSTRGSRSTQQTRRPSSTTRPTTSSSRPETTRTSSTTTPTPSPRSGSKKIRLLGATSGEQSSRPKRGFLNLLVWLRKRLRRLLERRGL

SEQ ID NO: 1205 - DNA, 357 bp, synthetic construct
  misc_feature 1..357: note = Adeno Associated Virus MAAP Protein Variant
  source 1..357: mol_type = other DNA
ctggagcccctcaacccaaggcaaatcaacaacatcaagacaacgctcgaggtcttgtgcttccgggttacaaataccttggacccggcaacggactcgacaagggggagccggtcaacgcagcagacgcggcggccctcgagcacgacaaggcctacgaccagcagctcaaggccggagacaacccgtacctcaagtacaaccacgccgacgccgagcggcaggagcggctcaaagaagatacgtcttttgggggcaacctcgggcgagcagtcttccaggccaaaaagaggcttcttgaacctcttggtctggttgaggaagcggctaagacggctcctggaaagaagaggcctg

SEQ ID NO: 1206 - protein, 119 aa, synthetic construct
  REGION 1..119: note = Adeno Associated Virus MAAP Protein Variant
LEPLNPRQINNIKTTLEVLCFRVTNTLDPATDSTRGSRSTQQTRRPSSTTRPTTSSSRPETTRTSSTTTPTPSGRSGSKKIRLLGATSGEQSSRPKRGFLNLLVWLRKRLRRLLERRGL

SEQ ID NO: 1207 - DNA, 357 bp, synthetic construct
  misc_feature 1..357: note = Adeno Associated Virus MAAP Protein Variant
  source 1..357: mol_type = other DNA
ctggagcccctcaacccaaggcaaatcaacaacatcaagacaacgctcgaggtcttgtgcttccgggttacaaataccttggacccggcaacggactcgacaagggggagccggtccgagcagcagacgcggcggccctcgagcacgacaaggcctacgaccagcagctcaaggccggagacaacccgtacctcaagtacaaccacgccgacgccgagttccaggagcggctcaaagaagatacgtcttttgggggcaacctcgggcgagcagtcttccaggccaaaaagaggcttcttgaacctcttggtctggttgaggaagcggctaagacggctcctggaaagaagaggcctg

SEQ ID NO: 1208 - protein, 119 aa, synthetic construct
  REGION 1..119: note = Adeno Associated Virus MAAP Protein Variant
LEPLNPRQINNIKTTLEVLCFRVTNTLDPATDSTRGSRSEQQTRRPSSTTRPTTSSSRPETTRTSSTTTPTPSSRSGSKKIRLLGATSGEQSSRPKRGFLNLLVWLRKRLRRLLERRGL

SEQ ID NO: 1209 - DNA, 357 bp, synthetic construct
  misc_feature 1..357: note = Adeno Associated Virus MAAP Protein Variant
  source 1..357: mol_type = other DNA
ctggagcccctcaacccaaggcaaatcaacaacatcaagacaacgctcgaggtcttgtgcttccgggttacaaataccttggacccggcaacggactcgacaagggggagccggtcaacgcagcagacgcggcggccctcgagcacgacaaggcctacgaccagcagctcaaggccggagacaacccgtacctcaagtacaaccacgccgacgccgaggttcaggagcggctcaaagaagatacgtcttttgggggcaacctcgggcgagcagtcttccaggccaaaaagaggcttcttgaacctcttggtctggttgaggaagcggctaagacggctcctggaaagaagaggcctg

SEQ ID NO: 1210 - protein, 119 aa, synthetic construct
  REGION 1..119: note = Adeno Associated Virus MAAP Protein Variant
LEPLNPRQINNIKTTLEVLCFRVTNTLDPATDSTRGSRSTQQTRRPSSTTRPTTSSSRPETTRTSSTTTPTPRFRSGSKKIRLLGATSGEQSSRPKRGFLNLLVWLRKRLRRLLERRGL

SEQ ID NO: 1211 - DNA, 357 bp, synthetic construct
  misc_feature 1..357: note = Adeno Associated Virus MAAP Protein Variant
  source 1..357: mol_type = other DNA
ctggagcccctcaacccgaagcaaatcaacaacatcaagacaacgctcgaggtcttgtgcttccgggttacaaataccttggacccggcaacggactcgacaagggggagccggtcaacgcagcagacgcggcggccctcgagcacgacaaggcctacgaccagcagctcaaggccggagacaacccgtacctcaagtacaaccacgccgacgccgagttccaggagcggctcaaagaagatacgtcttttgggggcaacctcgggcgagcagtcttccaggccaaaaagaggcttcttgaacctcttggtctggttgaggaagcggctaagacggctcctggaaagaagaggcctg

SEQ ID NO: 1212 - protein, 119 aa, synthetic construct
  REGION 1..119: note = Adeno Associated Virus MAAP Protein Variant
LEPLNPKQINNIKTTLEVLCFRVTNTLDPATDSTRGSRSTQQTRRPSSTTRPTTSSSRPETTRTSSTTTPTPSSRSGSKKIRLLGATSGEQSSRPKRGFLNLLVWLRKRLRRLLERRGL

SEQ ID NO: 1213 - DNA, 357 bp, synthetic construct
  misc_feature 1..357: note = Adeno Associated Virus MAAP Protein Variant
  source 1..357: mol_type = other DNA
ctggagcccctcaacccaaggcaaatcaacaacatcaagacaacgctcgaggtcttgtgcttccgggttacaaatactggggacccggcaacggactcgacaagggggagccggtcaacgcagcagacgcggcggccctcgagcacgacaaggcctacgaccagcagctcaaggccggagacaacccgtacctcaagtacaaccacgccgacgccgagttccaggagcggctcaaagaagatacgtcttttgggggcaacctcgggcgagcagtcttccaggccaaaaagaggcttcttgaacctcttggtctggttgaggaagcggctaagacggctcctggaaagaagaggcctg

SEQ ID NO: 1214 - protein, 119 aa, synthetic construct
  REGION 1..119: note = Adeno Associated Virus MAAP Protein Variant
LEPLNPRQINNIKTTLEVLCFRVTNTGDPATDSTRGSRSTQQTRRPSSTTRPTTSSSRPETTRTSSTTTPTPSSRSGSKKIRLLGATSGEQSSRPKRGFLNLLVWLRKRLRRLLERRGL

SEQ ID NO: 1215 - DNA, 357 bp, synthetic construct
  misc_feature 1..357: note = Adeno Associated Virus MAAP Protein Variant
  source 1..357: mol_type = other DNA
ctggagcccctcaacccaaggcaaatcaacaacatcaagacaacgctcgaggtcttgtgcttccgggttacaaatactgtggacccggcaacggactcgacaagggggagccggtcaacgcagcagacgcggcggccctcgagcacgacaaggcctacgaccagcagctcaaggccggagacaacccgtacctcaagtacaaccacgccgacgccgagttccaggagcggctcaaagaagatacgtcttttgggggcaacctcgggcgagcagtcttccaggccaaaaagaggcttcttgaacctcttggtctggttgaggaagcggctaagacggctcctggaaagaagaggcctg

SEQ ID NO: 1216 - protein, 119 aa, synthetic construct; identical to SEQ ID NO: 1188
  REGION 1..119: note = Adeno Associated Virus MAAP Protein Variant

SEQ ID NO: 1217 - DNA, 357 bp, synthetic construct
  misc_feature 1..357: note = Adeno Associated Virus MAAP Protein Variant
  source 1..357: mol_type = other DNA
ctggagcccctcaacccaaggcaaatcaacaacatcaagacaacgctcgaggtcttgtgcttccgggttacaaatacccaggacccggcaacggactcgacaagggggagccggtcaacgcagcagacgcggcggccctcgagcacgacaaggcctacgaccagcagctcaaggccggagacaacccgtacctcaagtacaaccacgccgacgccgagttccaggagcggctcaaagaagatacgtcttttgggggcaacctcgggcgagcagtcttccaggccaaaaagaggcttcttgaacctcttggtctggttgaggaagcggctaagacggctcctggaaagaagaggcctg

SEQ ID NO: 1218 - protein, 119 aa, synthetic construct
  REGION 1..119: note = Adeno Associated Virus MAAP Protein Variant
LEPLNPRQINNIKTTLEVLCFRVTNTQDPATDSTRGSRSTQQTRRPSSTTRPTTSSSRPETTRTSSTTTPTPSSRSGSKKIRLLGATSGEQSSRPKRGFLNLLVWLRKRLRRLLERRGL

SEQ ID NO: 1219 - DNA, 357 bp, synthetic construct
  misc_feature 1..357: note = Adeno Associated Virus MAAP Protein Variant
  source 1..357: mol_type = other DNA
ctggagcccctcaacccaaggcaaatcaacaacatcaagacaacgctcgaggtcttgtgcttccgggttacaaataccttggacccggcaacggactcgacaagggggagccggtcaacgcagcagacgcggcggccctcgagcacgacaaggcctacgaccagcagctcaaggccggagacaacccggatctcaagtacaaccacgccgacgccgagttccaggagcggctcaaagaagatacgtcttttgggggcaacctcgggcgagcagtcttccaggccaaaaagaggcttcttgaacctcttggtctggttgaggaagcggctaagacggctcctggaaagaagaggcctg

SEQ ID NO: 1220 - protein, 119 aa, synthetic construct
  REGION 1..119: note = Adeno Associated Virus MAAP Protein Variant
LEPLNPRQINNIKTTLEVLCFRVTNTLDPATDSTRGSRSTQQTRRPSSTTRPTTSSSRPETTRISSTTTPTPSSRSGSKKIRLLGATSGEQSSRPKRGFLNLLVWLRKRLRRLLERRGL

SEQ ID NO: 1221 - DNA, 357 bp, synthetic construct
  misc_feature 1..357: note = Adeno Associated Virus MAAP Protein Variant
  source 1..357: mol_type = other DNA
ctggagcccctcaacccaaggcaaatcaacaacatcaagacaacgctcgaggtcttgtgcttccgggttacaaataccttggacccggcaacggactcgacaagggggagccggtcaacgcagcagacgcggcggccctcgagcacgacaaggcctacgaccagcagctcaaggccggagacaacccgtacctcaagtacaaccacgccgacgccgaggtacaggagcggctcaaagaagatacgtcttttgggggcaacctcgggcgagcagtcttccaggccaaaaagaggcttcttgaacctcttggtctggttgaggaagcggctaagacggctcctggaaagaagaggcctg

SEQ ID NO: 1222 - protein, 119 aa, synthetic construct
  REGION 1..119: note = Adeno Associated Virus MAAP Protein Variant
LEPLNPRQINNIKTTLEVLCFRVTNTLDPATDSTRGSRSTQQTRRPSSTTRPTTSSSRPETTRTSSTTTPTPRYRSGSKKIRLLGATSGEQSSRPKRGFLNLLVWLRKRLRRLLERRGL

SEQ ID NO: 1223 - DNA, 357 bp, synthetic construct
  misc_feature 1..357: note = Adeno Associated Virus MAAP Protein Variant
  source 1..357: mol_type = other DNA
ctggagcccctcaacccaaggcaaatcaacaacatcaagacaacgctcgaggtcttgtgcttccgggttacaaataccttggacccggcaacggactcgacaagggggagccggtcaacgcagcagacgcggcggccctcgagcacgacaaggcctacgaccagcagctcaaggccggagacaacccgacgctcaagtacaaccacgccgacgccgagttccaggagcggctcaaagaagatacgtcttttgggggcaacctcgggcgagcagtcttccaggccaaaaagaggcttcttgaacctcttggtctggttgaggaagcggctaagacggctcctggaaagaagaggcctg

SEQ ID NO: 1224 - protein, 119 aa, synthetic construct
  REGION 1..119: note = Adeno Associated Virus MAAP Protein Variant
LEPLNPRQINNIKTTLEVLCFRVTNTLDPATDSTRGSRSTQQTRRPSSTTRPTTSSSRPETTRRSSTTTPTPSSRSGSKKIRLLGATSGEQSSRPKRGFLNLLVWLRKRLRRLLERRGL

SEQ ID NO: 1225 - DNA, 357 bp, synthetic construct
  misc_feature 1..357: note = Adeno Associated Virus MAAP Protein Variant
  source 1..357: mol_type = other DNA
ctggagcccctcaacccaaggcaaatcaacaacatcaagacaacgctcgaggtcttgtgcttccgggttacaaataccttggacccggcaacggactctacaagggggagccggtcaacgcagcagacgcggcggccctcgagcacgacaaggcctacgaccagcagctcaaggccggagacaacccgtacctcaagtacaaccacgccgacgccgagttccaggagcggctcaaagaagatacgtcttttgggggcaacctcgggcgagcagtcttccaggccaaaaagaggcttcttgaacctcttggtctggttgaggaagcggctaagacggctcctggaaagaagaggcctg

SEQ ID NO: 1226 - protein, 119 aa, synthetic construct; identical to SEQ ID NO: 1136
  REGION 1..119: note = Adeno Associated Virus MAAP Protein Variant

SEQ ID NO: 1227 - DNA, 357 bp, synthetic construct
  misc_feature 1..357: note = Adeno Associated Virus MAAP Protein Variant
  source 1..357: mol_type = other DNA
ctggagcccctcaacccaaggcaaatcaacaacatcaagacaacgctcgaggtcttgtgcttccgggttacaaatactcgggacccggcaacggactcgacaagggggagccggtcaacgcagcagacgcggcggccctcgagcacgacaaggcctacgaccagcagctcaaggccggagacaacccgtacctcaagtacaaccacgccgacgccgagttccaggagcggctcaaagaagatacgtcttttgggggcaacctcgggcgagcagtcttccaggccaaaaagaggcttcttgaacctcttggtctggttgaggaagcggctaagacggctcctggaaagaagaggcctg

SEQ ID NO: 1228 - protein, 119 aa, synthetic construct
  REGION 1..119: note = Adeno Associated Virus MAAP Protein Variant
LEPLNPRQINNIKTTLEVLCFRVTNTRDPATDSTRGSRSTQQTRRPSSTTRPTTSSSRPETTRTSSTTTPTPSSRSGSKKIRLLGATSGEQSSRPKRGFLNLLVWLRKRLRRLLERRGL

SEQ ID NO: 1229 - DNA, 357 bp, synthetic construct
  misc_feature 1..357: note = Adeno Associated Virus MAAP Protein Variant
  source 1..357: mol_type = other DNA
ctggagcccctcaacccaaggcaaatcaacaacatcaagacaacgctcgaggtcttgtgcttccgggttacaaataccttggacccggcaacggactcgacaagggggagccggtcaacgcagcagacgcggcggccctcgagcacgacaaggcctacgaccagcagctcaaggccggagacaacccgtacctcaagtacaaccacgccgacgccgagttccaggagcggctcaaagaagatacgtcttttgggggcaacctcgggcgagcagtcttccaggccaaaaagaggcttcgtgaacctcttggtctggttgaggaagcggctaagacggctcctggaaagaagaggcctg

SEQ ID NO: 1230 - protein, 119 aa, synthetic construct
  REGION 1..119: note = Adeno Associated Virus MAAP Protein Variant
LEPLNPRQINNIKTTLEVLCFRVTNTLDPATDSTRGSRSTQQTRRPSSTTRPTTSSSRPETTRTSSTTTPTPSSRSGSKKIRLLGATSGEQSSRPKRGFVNLLVWLRKRLRRLLERRGL

SEQ ID NO: 1231 - DNA, 357 bp, synthetic construct
  misc_feature 1..357: note = Adeno Associated Virus MAAP Protein Variant
  source 1..357: mol_type = other DNA
ctggagcccctcaacccaaggcaaatcaacaacatcaagacaacgctcgaggtcttgtgcttccgggttacaaataccttggacccggcaacggactcgacaagggggagccggtcaacgcagcagacgcggcggccctcgagcacgacaaggcctacgaccagcagctcaaggccggagacaacccgtacctcaagtacaaccacgccgacgccgagtcgcaggagcggctcaaagaagatacgtcttttgggggcaacctcgggcgagcagtcttccaggccaaaaagaggcttcttgaacctcttggtctggttgaggaagcggctaagacggctcctggaaagaagaggcctg

SEQ ID NO: 1232 - protein, 119 aa, synthetic construct
  REGION 1..119: note = Adeno Associated Virus MAAP Protein Variant
LEPLNPRQINNIKTTLEVLCFRVTNTLDPATDSTRGSRSTQQTRRPSSTTRPTTSSSRPETTRTSSTTTPTPSRRSGSKKIRLLGATSGEQSSRPKRGFLNLLVWLRKRLRRLLERRGL

SEQ ID NO: 1233 - DNA, 591 bp, synthetic construct
  misc_feature 1..591: note = Adeno Associated Virus AAP Protein Variant
  source 1..591: mol_type = other DNA
ctggcgacacagagtcagtcccagaccctcaaccaatcggagaacctcccgcagccccctcaggtgtgggatctcttacaatggcttcaggtggtggcgcaccagtggcagacaataacgaaggtgccgatggagtgggtagttcctcgggaaattggcattgcgattcccaatggctgggggacagagtcatcaccaccagcacccgaacctgggccctgcccacctacaacaatcacctctacaagcaaatctccaacagcacatctggaggatcttcaaatgacaacgcctacttcggctacagcaccccctgggggtattttgacttcaacagattccactgccacttctcaccacgtgactggcagcgactcatcaacaacaactggggattccggcctaagcgactcaacttcaagctcttcaacattcaggtcaaagaggttacggacaacaatggagtcaagaccatcgccaataaccttaccagcacggtccaggtcttcacggactcagactatcagctcccgtacgtgctcgggtcggctcacgagggctgcctcccgccgttcccagcggacgttttca

SEQ ID NO: 1234 - protein, 197 aa, synthetic construct
  REGION 1..197: note = Adeno Associated Virus AAP Protein Variant
LATQSQSQTLNQSENLPQPPQVWDLLQWLQVVAHQWQTITKVPMEWVVPREIGIAIPNGWGTESSPPAPEPGPCPPTTITSTSKSPTAHLEDLQMTTPTSATAPPGGILTSTDSTATSHHVTGSDSSTTTGDSGLSDSTSSSSTFRSKRLRTTMESRPSPITLPARSRSSRTQTISSRTCSGRLTRAASRRSQRTFS

SEQ ID NO: 1235 - DNA, 591 bp, synthetic construct
  misc_feature 1..591: note = Adeno Associated Virus AAP Protein Variant
  source 1..591: mol_type = other DNA
ctggcgacacagagtcagtcccagaccctcaaccaatcggagaacctcccgcagccccctcaggtgtgggatctcttacaatggcttcaggtggtggcgcaccaatggcagacaataacgaaggtgccgatggagtgggtagttcctcgggaaattggcattgcgattcccaatggctgggggacagagtcatcaccaccagcacccgaacctgggccctgcccacctacaacaatcacctctacaagcaaatctccaacagcacatctggaggatcttcaaatgacaacgcctacttcggctacagcaccccctgggggtattttgacttcaacagattccactgccacttctcaccacgtgactggcagcgactcatcaacaacaactggggattccggcctaagcgactcaacttcaagctcttcaacattcaggtcaaagaggttacggacaacaatggagtcaagaccatcgccaataaccttaccagcacggtccaggtcttcacggactcagactatcagctcccgtacgtgctcgggtcggctcacgagggctgcctcccgccgttcccagcggacgttttca

SEQ ID NO: 1236 - protein, 197 aa, synthetic construct; identical to SEQ ID NO: 1234
  REGION 1..197: note = Adeno Associated Virus AAP Protein Variant

SEQ ID NO: 1237 - DNA, 591 bp, synthetic construct
  misc_feature 1..591: note = Adeno Associated Virus AAP Protein Variant
  source 1..591: mol_type = other DNA
ctggcgacacagagtcagtcccagaccctcaaccaatcggagaacctcccgcagccccctcaggtgtgggatctcttacaatggcttcaggtggtggcgcaccagtggcagacaataacgaaggtgccgatggagtgggtagttcctcgggaaattggcattgcgattccacgtggctgggggacagagtcatcaccaccagcacccgaacctgggccctgcccacctacaacaatcacctctacaagcaaatctccaacagcacatctggaggatcttcaaatgacaacgcctacttcggctacagcaccccctgggggtattttgacttcaacagattccactgccacttctcaccacgtgactggcagcgactcatcaacaacaactggggattccggcctaagcgactcaacttcaagctcttcaacattcaggtcaaagaggttacggacaacaatggagtcaagaccatcgccaataaccttaccagcacggtccaggtcttcacggactcagactatcagctcccgtacgtgctcgggtcggctcacgagggctgcctcccgccgttcccagcggacgttttca

SEQ ID NO: 1238 - protein, 197 aa, synthetic construct
  REGION 1..197: note = Adeno Associated Virus AAP Protein Variant
LATQSQSQTLNQSENLPQPPQVWDLLQWLQVVAHQWQTITKVPMEWVVPREIGIAIPRGWGTESSPPAPEPGPCPPTTITSTSKSPTAHLEDLQMTTPTSATAPPGGILTSTDSTATSHHVTGSDSSTTTGDSGLSDSTSSSSTFRSKRLRTTMESRPSPITLPARSRSSRTQTISSRTCSGRLTRAASRRSQRTFS

SEQ ID NO: 1239 - DNA, 591 bp, synthetic construct
  misc_feature 1..591: note = Adeno Associated Virus AAP Protein Variant
  source 1..591: mol_type = other DNA
ctggcgacacagagtcagtcccagaccctcaaccaatcggagaacctcccgcagccccctcaggtgtgggatctcttacaatggcttcaggtggtggcgcaccagtggcagacaataacgaaggtgccgatggagtgggtagttcctcgggaaattggcattgcgattcccaatggctgggggacagagtcatcaccaccagcacccgaacctgggccctgcccacctacaacaatcacctctacaagcaaatctccaacagcacatctggaggatcttcaaatgacaacgcctacttcggctacagcaccccctgggggtattttgacttcaacagattccactgccacttctcaccacgtgactggcagcgactcatcaacaacaactggggattccggcctaagcgactcaacttcaagctcttcaacattcaggtcaaagaggttacggacaacaatggaacgaagaccatcgccaataaccttaccagcacggtccaggtcttcacggactcagactatcagctcccgtacgtgctcgggtcggctcacgagggctgcctcccgccgttcccagcggacgttttca

SEQ ID NO: 1240 - protein, 197 aa, synthetic construct
  REGION 1..197: note = Adeno Associated Virus AAP Protein Variant
LATQSQSQTLNQSENLPQPPQVWDLLQWLQVVAHQWQTITKVPMEWVVPREIGIAIPNGWGTESSPPAPEPGPCPPTTITSTSKSPTAHLEDLQMTTPTSATAPPGGILTSTDSTATSHHVTGSDSSTTTGDSGLSDSTSSSSTFRSKRLRTTMERRPSPITLPARSRSSRTQTISSRTCSGRLTRAASRRSQRTFS

SEQ ID NO: 1241 - DNA, 465 bp, synthetic construct
  misc_feature 1..465: note = Adeno Associated Virus AAP Protein Variant
  source 1..465: mol_type = other DNA
ctggcgacacagagtcagtcccagaccctcaaccaatcggagaacctcccgcagccccctcaggtgtgggatctcttacaatggcttcaggtggtggcgcaccaatggcagacaataacgaaggtgccgatggagtgggtagttcatcgggaaattggcattgcgattcccaatggctgggggacagagtcatcaccaccagcacccgaacctgggccctgcccacctacaacaatcacctctacaagcaaatctccaacagcacatctggaggatcttcaaatgacaacgcctacttcggctacagcaccccctgggggtattttgacttcaacagattccactgccacttctcaccacgtgactggcagcgactcatcaacaacaactggggattccggcctaagcgactcaacttcaagctcttcaacattcaggtcaaagaggttacggacaacaatggag

SEQ ID NO: 1242 - protein, 155 aa, synthetic construct
  REGION 1..155: note = Adeno Associated Virus AAP Protein Variant
LATQSQSQTLNQSENLPQPPQVWDLLQWLQVVAHQWQTITKVPMEWVVHREIGIAIPNGWGTESSPPAPEPGPCPPTTITSTSKSPTAHLEDLQMTTPTSATAPPGGILTSTDSTATSHHVTGSDSSTTTGDSGLSDSTSSSSTFRSKRLRTTME

SEQ ID NO: 1243 - DNA, 465 bp, synthetic construct
  misc_feature 1..465: note = Adeno Associated Virus AAP Protein Variant
  source 1..465: mol_type = other DNA
ctggcgacacagagtcagtcccagaccctcaaccaatcggagaacctcccgcagccccctcaggtgtgggatctcttacaatggcttcaggtggtggcgcaccagtggcagacaataacgaaggtgccgatggagtgggtagttcctcgggaaattggcattgcgattcccaatggctgggggacagagtcatcaccaccagcacccgaacctgggccctgcccacctacaacaatcacctctacaagcaaatctccaacagcacatctggaggatcttcaaatgacaacgcctacttcggctacagcaccccctgggggtattttgacttcaacagattccactgccacttctcaccacgtgactggcagcgactcatcaacaacaactggggattccggcctaagcgactcaacttcaagctcttcaacattcaggtcaaagaggttacggacaacaatggag

SEQ ID NO: 1244 - protein, 155 aa, synthetic construct
  REGION 1..155: note = Adeno Associated Virus AAP Protein Variant
LATQSQSQTLNQSENLPQPPQVWDLLQWLQVVAHQWQTITKVPMEWVVPREIGIAIPNGWGTESSPPAPEPGPCPPTTITSTSKSPTAHLEDLQMTTPTSATAPPGGILTSTDSTATSHHVTGSDSSTTTGDSGLSDSTSSSSTFRSKRLRTTME

SEQ ID NO: 1245 - DNA, 591 bp, synthetic construct
  misc_feature 1..591: note = Adeno Associated Virus AAP Protein Variant
  source 1..591: mol_type = other DNA
ctggcgacacagagtcagtcccagaccctcaaccaatcggagaacctcccgcagccccctcaggtgtgggatctcttacaatggcttcaggtggtggcgcaccagtggcagacaataacgaaggtgccgatggagtgggtagttcctcgggaaattggcattgcgattcccaatggctgggggacagagtcatcaccaccagcacccgaacctgggccctgcccacctacaacaatcacctctacaagcaaatctccaacagcacatctggaggatcttcaaatgacaacgcctacttcggctacagcaccccctgggggtattttgacttcaacagattccactgccacttctcaccacgtgactggcagcgactcatcaacaacaactggggattccggcctaagcgactcaacttcaagctcttcaacattcaggtcaaagaggttacggacaacaatggagtcaagaccatcgccaataaccttaccagcacggtccaggtcttcacggactcagagtatcagctcccgtacgtgctcgggtcggctcacgagggctgcctcccgccgttcccagcggacgttttca

SEQ ID NO: 1246 - protein, 197 aa, synthetic construct
  REGION 1..197: note = Adeno Associated Virus AAP Protein Variant
LATQSQSQTLNQSENLPQPPQVWDLLQWLQVVAHQWQTITKVPMEWVVPREIGIAIPNGWGTESSPPAPEPGPCPPTTITSTSKSPTAHLEDLQMTTPTSATAPPGGILTSTDSTATSHHVTGSDSSTTTGDSGLSDSTSSSSTFRSKRLRTTMESRPSPITLPARSRSSRTQSISSRTCSGRLTRAASRRSQRTFS

SEQ ID NO: 1247 - DNA, 591 bp, synthetic construct
  misc_feature 1..591: note = Adeno Associated Virus AAP Protein Variant
  source 1..591: mol_type = other DNA
ctggcgacacagagtcagtcccagaccctcaaccaatcggagaacctcccgcagccccctcaggtgtgggatctcttacaatggcttcaggtggtggcgcaccagtggcagacaataacgaaggtgccgatggagtgggtagttcctcgggaaattggcattgcgattcccaatggctgggggacagagtcatcaccaccagcacccgaacctgggccctgcccacctacaacaatcacctctacaagcaaatctccaacagcacatctggaggatcttcaaatgacaacgcctacttcggctacagcaccccctgggggtattttgacttcaacagattccactgccacttctcaccacgtgactggcagcgactcatcaacaacaactggggattccggcctaagcgactcaacttcaagctcttcaacattcaggtcaaagaggttacggacaacaatggagtcaagaccatcgccaataaccttaccagcacggtccaggtcttcacggactcagattatcagctcccgtacgtgctcgggtcggctcacgagggctgcctcccgccgttcccagcggacgttttca

SEQ ID NO: 1248 - protein, 197 aa, synthetic construct
  REGION 1..197: note = Adeno Associated Virus AAP Protein Variant
LATQSQSQTLNQSENLPQPPQVWDLLQWLQVVAHQWQTITKVPMEWVVPREIGIAIPNGWGTESSPPAPEPGPCPPTTITSTSKSPTAHLEDLQMTTPTSATAPPGGILTSTDSTATSHHVTGSDSSTTTGDSGLSDSTSSSSTFRSKRLRTTMESRPSPITLPARSRSSRTQIISSRTCSGRLTRAASRRSQRTFS

SEQ ID NO: 1249 - DNA, 591 bp, synthetic construct
  misc_feature 1..591: note = Adeno Associated Virus AAP Protein Variant
  source 1..591: mol_type = other DNA
ctggcgacacagagtcagtcccagaccctcaaccaatcggagaacctcccgcagccccctcaggtgtgggatctcttacaatggcttcaggtggtggcgcaccagtggcagacaataacgaaggtgccgatggagtgggtagttcctcgggaaattggcattgcgattcccaatggctgggggacagagtcatcaccaccagcacccgaacctgggccctgcccacctacaacaatcacctctacaagcaaatctccaacagcacatctggaggatcttcaaatgacaacgcctacttcggctacagcaccccctgggggtattttgacttcaacagattccactgccacttctcaccacgtgactggcagcgactcatcaacaacaactggggattccggcctaagcgactcaacttcaagctcttcaacattcaggtcaaagaggttacggacaacaatggaacgaagaccatcgccaataaccttaccagcacggtccaggtcttcacggactcagactatcagctcccgtacgtgctcgggtcggctcaccagggctgcctcccgccgttcccagcggacgttttca

SEQ ID NO: 1250 - protein, 197 aa, synthetic construct; identical to SEQ ID NO: 1240
  REGION 1..197: note = Adeno Associated Virus AAP Protein Variant

SEQ ID NO: 1251 - DNA, 591 bp, synthetic construct
  misc_feature 1..591: note = Adeno Associated Virus AAP Protein Variant
  source 1..591: mol_type = other DNA
ctggcgacacagagtcagtcccagaccctcaaccaatcggagaacctcccgcagccccctcaggtgtgggatctcttacaatggcttcaggtggtggcgcaccaatggcagacaataacgaaggtgccgatggagtgggtagttcctcgggaaattggcattgcgattcccaatggctgggggacagagtcatcaccaccagcacccgaacctgggccctgcccacctacaacaatcacctctacaagcaaatctccaacagcacatctggaggatcttcaaatgacaacgcctacttcggctacagcaccccctgggggtattttgacttcaacagattccactgccacttctcaccacgtgactggcagcgactcatcaacaacaactggggattccggcctaagcgactcaacttcaagctcttcaacattcaggtcaaagaggttacggacaacaatggagtcaagaccatcgccaataaccttaccagcacggtccaggtcttcacggactcagactatcagctcccgtacgtgctcgggtcggctcaccagggctgcctcccgccgttcccagcggacgttttca

SEQ ID NO: 1252 - protein, 197 aa, synthetic construct; identical to SEQ ID NO: 1234
  REGION 1..197: note = Adeno Associated Virus AAP Protein Variant

SEQ ID NO: 1253 - DNA, 591 bp, synthetic construct
  misc_feature 1..591: note = Adeno Associated Virus AAP Protein Variant
  source 1..591: mol_type = other DNA
ctggcgacacagagtcagtcccagaccctcaaccaatcggagaacctcccgcagccccctcaggtgtgggatctcttacaatggcttcaggtggtggcgcaccagtggcagacaataacgaaggtgccgatggagtgggtagttcctcgggaaattggcattgcgattcccaatggctgggggacagagtcatcaccaccagcacccgaacctgggccctgcccacctacaacaatcacctctacaagcaaatctccaacagcacatctggaggatcttcaaatgacaacgcctacttcggctacagcaccccctgggggtattttgacttcaacagattccactgccacttctcaccacgtgactggcagcgactcatcaacaacaactggggattccggcctaagcgactcaacttcaagctcttcaacattcaggtcaaagaggttacggacaacaatggagtcaagaccatcgccaataaccttaccagcacggtccaggtcttcacggactcagactatcagctcccgtacgtgctcgggtcggctcaccagggctgcctcccgccgttcccagcggacgttttca

SEQ ID NO: 1254 - protein, 197 aa, synthetic construct; identical to SEQ ID NO: 1234
  REGION 1..197: note = Adeno Associated Virus AAP Protein Variant

SEQ ID NO: 1255 - DNA, 465 bp, synthetic construct
  misc_feature 1..465: note = Adeno Associated Virus AAP Protein Variant
  source 1..465: mol_type = other DNA
ctggcgacacagagtcagtcccagaccctcaaccaatcggagaacctcccgcagccccctcaggtgtgggatctcttacaatggcttcaggtggtggcgcaccaatggcagacaataacgaaggtgccgatggagtgggtagttcctcgggaaattggcattgcgattcccaatggctgggggacagagtcatcaccaccagcacccgaacctgggccctgcccacctacaacaatcacctctacaagcaaatctccaacagcacatctggaggatcttcaaatgacaacgcctacttcggctacagcaccccctgggggtattttgacttcaacagattccactgccacttctcaccacgtgactggcagcgactcatcaacaacaactggggattccggcctaagcgactcaacttcaagctcttcaacattcaggtcaaagaggttacggacaacaatggag

SEQ ID NO: 1256 - protein, 155 aa, synthetic construct; identical to SEQ ID NO: 1244
  REGION 1..155: note = Adeno Associated Virus AAP Protein Variant

SEQ ID NO: 1257 - DNA, 591 bp, synthetic construct
  misc_feature 1..591: note = Adeno Associated Virus AAP Protein Variant
  source 1..591: mol_type = other DNA
ctggcgacacagagtcagtcccagaccctcaaccaatcggagaacctccctcagccccctcaggtgtgggatctcttacaatggcttcaggtggtggcgcaccagtggcagacaataacgaaggtgccgatggagtgggtagttcctcgggaaattggcattgcgattcccaatggctgggggacagagtcatcaccaccagcacccgaacctgggccctgcccacctacaacaatcacctctacaagcaaatctccaacagcacatctggaggatcttcaaatgacaacgcctacttcggctacagcaccccctgggggtattttgacttcaacagattccactgccacttctcaccacgtgactggcagcgactcatcaacaacaactggggattccggcctaagcgactcaacttcaagctcttcaacattcaggtcaaagaggttacggacaacaatggagtcaagaccatcgccaataaccttaccagcacggtccaggtcttcacggactcagactatcagctcccgtacgtgctcgggtcggctcacgagggctgcctcccgccgttcccagcggacgttttca

SEQ ID NO: 1258 - protein, 197 aa, synthetic construct; identical to SEQ ID NO: 1234
  REGION 1..197: note = Adeno Associated Virus AAP Protein Variant

SEQ ID NO: 1259 - DNA, 591 bp, synthetic construct
  misc_feature 1..591: note = Adeno Associated Virus AAP Protein Variant
  source 1..591: mol_type = other DNA
ctggcgacacagagtcagtcccagaccctcaaccaatcggagaacctcccgcagccccctcaggtgtgggatctcttacaatggcttcaggtggtggcgcaccagtggcagacaataacgaaggtgccgatggagtgggtagttcctcgggaaattggcattgcgattcccaatggctgggggacagagtcatcaccaccagcacccgaacctgggccctgcccacctacaacaatcacctctacaagcaaatctccaacagcacatctggaggatcttcaaatgacaacgcctacttcggctacagcaccccctgggggtattttgacttcaacagattccactgccacttctcaccacgtgactggcagcgactcatcaacaacaactggggattccggcctaagcgactcaacttcaagctcttcaacattcaggtcaaagaggttacggacaacaatggagtcaagaccatcgccaataaccttaccagcacggtccaggtcttctcggactcagactatcagctcccgtacgtgctcgggtcggctcacgagggctgcctcccgccgttcccagcggacgttttca

SEQ ID NO: 1260 - protein, 197 aa, synthetic construct; identical to SEQ ID NO: 1234
  REGION 1..197: note = Adeno Associated Virus AAP Protein Variant

SEQ ID NO: 1261 - DNA, 591 bp, synthetic construct
  misc_feature 1..591: note = Adeno Associated Virus AAP Protein Variant
  source 1..591: mol_type = other DNA
ctggcgacacagagtcagtcccagaccctcaaccaatcggagaacctcccgcagccccctcaggtgtgggatctcttacaatggcttcaggtggtggcgcaccagtggcagacaataacgaaggttccgatggagtgggtagttcctcgggaaattggcattgcgattcccaatggctgggggacagagtcatcaccaccagcacccgaacctgggccctgcccacctacaacaatcacctctacaagcaaatctccaacagcacatctggaggatcttcaaatgacaacgcctacttcggctacagcaccccctgggggtattttgacttcaacagattccactgccacttctcaccacgtgactggcagcgactcatcaacaacaactggggattccggcctaagcgactcaacttcaagctcttcaacattcaggtcaaagaggttacggacaacaatggagtcaagaccatcgccaataaccttaccagcacggtccaggtcttcacggactcagactatcagctcccgtacgtgctcgggtcggctcacgagggctgcctcccgccgttcccagcggacgttttca

SEQ ID NO: 1262 - protein, 197 aa, synthetic construct; identical to SEQ ID NO: 1234
  REGION 1..197: note = Adeno Associated Virus AAP Protein Variant

SEQ ID NO: 1263 - DNA, 591 bp, synthetic construct
  misc_feature 1..591: note = Adeno Associated Virus AAP Protein Variant
  source 1..591: mol_type = other DNA
ctggcgacacagagtcagtcccagaccctcaaccaatcggagaacctcccgcagccccctcaggtgtgggatctcttacaatggctccaggtggtggcgcaccagtggcagacaataacgaaggtgccgatggagtgggtagttcctcgggaaattggcattgcgattcccaatggctgggggacagagtcatcaccaccagcacccgaacctgggccctgcccacctacaacaatcacctctacaagcaaatctccaacagcacatctggaggatcttcaaatgacaacgcctacttcggctacagcaccccctgggggtattttgacttcaacagattccactgccacttctcaccacgtgactggcagcgactcatcaacaacaactggggattccggcctaagcgactcaacttcaagctcttcaacattcaggtcaaagaggttacggacaacaatggagtcaagaccatcgccaataaccttaccagcacggtccaggtcttcacggactcagactatcagctcccgtacgtgctcgggtcggctcacgagggctgcctcccgccgttcccagcggacgttttca

SEQ ID NO: 1264 - protein, 197 aa, synthetic construct; identical to SEQ ID NO: 1234
  REGION 1..197: note = Adeno Associated Virus AAP Protein Variant

SEQ ID NO: 1265 - DNA, 591 bp, synthetic construct
  misc_feature 1..591: note = Adeno Associated Virus AAP Protein Variant
  source 1..591: mol_type = other DNA
ctggcgacacagagtcagtcccagaccctcaaccaatcggagaacctcccgcagccccctcaggtgtgggatctcttacaatggcttcaggtggtggcgcaccagtggcagacaataacgaaggtgccgatggagtgggtagttcctcgggaaattggcattgcgattcccaatggctgggggacagagtcatcaccaccagcacccgaacctgggccctgcccacctacaacaatcacctctacaagcaaatctccaacagcacatctggaggatcttcaaatgacaacgcctacttcggctacagcaccccctgggggtattttgacttcaacagattccactgccacttctcaccacgtgactggcagcgactcatcaacaacaactggggattccggcctaagcgactcaacttcaagctcttcaacattcaggtcaaagaggttacggacaacaatggagtcaagaccatcgccaataaccttaccagcacggtccaggtcttcacggacacagactatcagctcccgtacgtgctcgggtcggctcacgagggctgcctcccgccgttcccagcggacgttttca

SEQ ID NO: 1266 - protein, 197 aa, synthetic construct; identical to SEQ ID NO: 1234
  REGION 1..197: note = Adeno Associated Virus AAP Protein Variant

SEQ ID NO: 1267 - DNA, 591 bp, synthetic construct
  misc_feature 1..591: note = Adeno Associated Virus AAP Protein Variant
  source 1..591: mol_type = other DNA
ctggcgacacagagtcagtcccagaccctcaaccaatcggagaacctcccgcagccccctcaggtgtgggatctcttacaatggcttcaggtggtggcgcaccagtggcagacaataacgaaggtgccgatggagtgggtagttcctcgggaaattggcattgcgattcccaatggctgggggacagagtcatcaccaccagcacccgaacctgggccctgcccacctacaacaatcacctctacaagcaaatctccaacagcacatctggaggatcttcaaatgacaacgcctacttcggctacagcaccccctgggggtattttgacttcaacagattccactgccacttctcaccacgtgactggcagcgactcatcaacaacaactggggattccggcctaagcgactcaacttcaagctcttcaacattcaggtcaaagaggttacggacaacaatggagtcaagtctatcgccaataaccttaccagcacggtccaggtcttcacggactcagactatcagctcccgtacgtgctcgggtcggctcacgagggctgcctcccgccgttcccagcggacgttttca

SEQ ID NO: 1268 - protein, 197 aa, synthetic construct
  REGION 1..197: note = Adeno Associated Virus AAP Protein Variant
LATQSQSQTLNQSENLPQPPQVWDLLQWLQVVAHQWQTITKVPMEWVVPREIGIAIPNGWGTESSPPAPEPGPCPPTTITSTSKSPTAHLEDLQMTTPTSATAPPGGILTSTDSTATSHHVTGSDSSTTTGDSGLSDSTSSSSTFRSKRLRTTMESSLSPITLPARSRSSRTQTISSRTCSGRLTRAASRRSQRTFS

SEQ ID NO: 1269 - DNA, 591 bp, synthetic construct
  misc_feature 1..591: note = Adeno Associated Virus AAP Protein Variant
  source 1..591: mol_type = other DNA
ctggcgacacagagtcagtcccagaccctcaaccaatcggagaacctcccgcagccccctcaggtgtgggatctcttacaatggcttcaggtggtggcgcaccagtggcagacaataacgaaggtgccgatggagtgggtagttcctcgggaaattggcattgcgattcccaatggctgggggacagagtcatcaccaccagcacccgaacctgggccctgcccacctacaacaatcacctctacaagcaaatctccaacagcacatctggaggatcttcaaatgacaacgcctacttcggctacagcaccccctgggggtattttgacttcaacagattccactgccacttctcaccacgtgactggcagcgactcatcaacaacaactggggattccggcctaagcgactcaacttcaagctcttcaacattcaggtcaaagaggttacggacaacaatggagtcaagaccatcgcgaataaccttaccagcacggtccaggtcttcacggactcagactatcagctcccgtacgtgctcgggtcggctcacgagggctgcctcccgccgttcccagcggacgttttca

SEQ ID NO: 1270 - protein, 197 aa, synthetic construct
  REGION 1..197: note = Adeno Associated Virus AAP Protein Variant
LATQSQSQTLNQSENLPQPPQVWDLLQWLQVVAHQWQTITKVPMEWVVPREIGIAIPNGWGTESSPPAPEPGPCPPTTITSTSKSPTAHLEDLQMTTPTSATAPPGGILTSTDSTATSHHVTGSDSSTTTGDSGLSDSTSSSSTFRSKRLRTTMESRPSRITLPARSRSSRTQTISSRTCSGRLTRAASRRSQRTFS

SEQ ID NO: 1271 - DNA, 591 bp, synthetic construct
  misc_feature 1..591: note = Adeno Associated Virus AAP Protein Variant
  source 1..591: mol_type = other DNA
ctggcgacacagagtcagtcccagaccctcaaccaatcggagaacctcccgcagccccctcaggtgtgggatctcttacaatggcttcaggtggtggcgcaccagtggcagacaataacgaaggtgccgatggagtgggtagttcctcgggaaattggcattgcgattcccaatggctgggggacagagtcatcaccaccagcacccgaacctgggccctgcccacctacaacaatcacctctacaagcaaatctccaacagcacatctggaggatcttcaaatgacaacgcctacttcggctacagcaccccctgggggtattttgacttcaacagattccactgccacttctcaccacgtgactggcagcgactcatcaacaacaactggggattccggcctaagcgactcaacttcaagctcttcaacattcaggtcaaagaggttacggacaacaatggagtcaagactatcgccaataaccttaccagcacggtccaggtcttcacggactcagactatcagctcccgtacgtgctcgggtcggctcacgagggctgcctcccgccgttcccagcggacgttttca

SEQ ID NO: 1272 - protein, 197 aa, synthetic construct
  REGION 1..197: note = Adeno Associated Virus AAP Protein Variant
LATQSQSQTLNQSENLPQPPQVWDLLQWLQVVAHQWQTITKVPMEWVVPREIGIAIPNGWGTESSPPAPEPGPCPPTTITSTSKSPTAHLEDLQMTTPTSATAPPGGILTSTDSTATSHHVTGSDSSTTTGDSGLSDSTSSSSTFRSKRLRTTMESRLSPITLPARSRSSRTQTISSRTCSGRLTRAASRRSQRTFS

SEQ ID NO: 1273 - DNA, 591 bp, synthetic construct
  misc_feature 1..591: note = Adeno Associated Virus AAP Protein Variant
  source 1..591: mol_type = other DNA
ctggcgacacagagtcagtcccagaccctcaaccaatcggagcgcctcccgcagccccctcaggtgtgggatctcttacaatggcttcaggtggtggcgcaccagtggcagacaataacgaaggtgccgatggagtgggtagttcctcgggaaattggcattgcgattcccaatggctgggggacagagtcatcaccaccagcacccgaacctgggccctgcccacctacaacaatcacctctacaagcaaatctccaacagcacatctggaggatcttcaaatgacaacgcctacttcggctacagcaccccctgggggtattttgacttcaacagattccactgccacttctcaccacgtgactggcagcgactcatcaacaacaactggggattccggcctaagcgactcaacttcaagctcttcaacattcaggtcaaagaggttacggacaacaatggagtcaagaccatcgccaataaccttaccagcacggtccaggtcttcacggactcagactatcagctcccgtacgtgctcgggtcggctcacgagggctgcctcccgccgttcccagcggacgttttca

SEQ ID NO: 1274 - protein, 197 aa, synthetic construct
  REGION 1..197: note = Adeno Associated Virus AAP Protein Variant
LATQSQSQTLNQSERLPQPPQVWDLLQWLQVVAHQWQTITKVPMEWVVPREIGIAIPNGWGTESSPPAPEPGPCPPTTITSTSKSPTAHLEDLQMTTPTSATAPPGGILTSTDSTATSHHVTGSDSSTTTGDSGLSDSTSSSSTFRSKRLRTTMESRPSPITLPARSRSSRTQTISSRTCSGRLTRAASRRSQRTFS

SEQ ID NO: 1275 - DNA, 591 bp, synthetic construct
  misc_feature 1..591: note = Adeno Associated Virus AAP Protein Variant
  source 1..591: mol_type = other DNA
ctggcgacacagagtcagtcccagaccctcaaccaatcggagaacctcccgcagccccctcaggtgtgggatctcttacaatggcttcaggtggtggcgcaccagtggcagacaataacgaaggtgccgatggagtgggtagttcctcgggaaattggcattgcgattcccaatggctgggggacagagtcatcaccaccagcacccgaacctgggccctgcccacctacaactgtcacctctacaagcaaatctccaacagcacatctggaggatcttcaaatgacaacgcctacttcggctacagcaccccctgggggtattttgacttcaacagattccactgccacttctcaccacgtgactggcagcgactcatcaacaacaactggggattccggcctaagcgactcaacttcaagctcttcaacattcaggtcaaagaggttacggacaacaatggagtcaagaccatcgccaataaccttaccagcacggtccaggtcttcacggactcagactatcagctcccgtacgtgctcgggtcggctcacgagggctgcctcccgccgttcccagcggacgttttca

SEQ ID NO: 1276 - protein, 197 aa, synthetic construct
  REGION 1..197: note = Adeno Associated Virus AAP Protein Variant
LATQSQSQTLNQSENLPQPPQVWDLLQWLQVVAHQWQTITKVPMEWVVPREIGIAIPNGWGTESSPPAPEPGPCPPTTVTSTSKSPTAHLEDLQMTTPTSATAPPGGILTSTDSTATSHHVTGSDSSTTTGDSGLSDSTSSSSTFRSKRLRTTMESRPSPITLPARSRSSRTQTISSRTCSGRLTRAASRRSQRTFS

SEQ ID NO: 1277 - DNA, 591 bp, synthetic construct
  misc_feature 1..591: note = Adeno Associated Virus AAP Protein Variant
  source 1..591: mol_type = other DNA
ctggcgacacagagtcagtcccagaccctcaaccaatcggagaacctcccgcagccccctcaggtgtgggatctcttacaatggcttcaggtggtggcgcaccagtggcagacaataacgaaggtgccgatggagtgggtagttcctcgggaaattggcattgcgattcccaatggctgggggacagagtcatcaccaccagcacccgaacctgggccctgcccacctacaacaatcacctctacaagcaaatctccaacagcacatctggaggatcttcaaatgacaacgcctacttcggctacagcacaccctgggggtattttgacttcaacagattccactgccacttctcaccacgtgactggcagcgactcatcaacaacaactggggattccggcctaagcgactcaacttcaagctcttcaacattcaggtcaaagaggttacggacaacaatggagtcaagaccatcgccaataaccttaccagcacggtccaggtcttcacggactcagactatcagctcccgtacgtgctcgggtcggctcacgagggctgcctcccgccgttcccagcggacgttttca

SEQ ID NO: 1278 - protein, 197 aa, synthetic construct
  REGION 1..197: note = Adeno Associated Virus AAP Protein Variant
LATQSQSQTLNQSENLPQPPQVWDLLQWLQVVAHQWQTITKVPMEWVVPREIGIAIPNGWGTESSPPAPEPGPCPPTTITSTSKSPTAHLEDLQMTTPTSATAHPGGILTSTDSTATSHHVTGSDSSTTTGDSGLSDSTSSSSTFRSKRLRTTMESRPSPITLPARSRSSRTQTISSRTCSGRLTRAASRRSQRTFS

SEQ ID NO: 1279 - DNA, 591 bp, synthetic construct
  misc_feature 1..591: note = Adeno Associated Virus AAP Protein Variant
  source 1..591: mol_type = other DNA
ctggcgacacagagtcagtcccagaccctcaaccaatcggagaacctcccgcagccccctcaggtgtgggatctcttacaatggcttcaggcggtggcgcaccagtggcagacaataacgaaggtgccgatggagtgggtagttcctcgggaaattggcattgcgattcccaatggctgggggacagagtcatcaccaccagcacccgaacctgggccctgcccacctacaacaatcacctctacaagcaaatctccaacagcacatctggaggatcttcaaatgacaacgcctacttcggctacagcaccccctgggggtattttgacttcaacagattccactgccacttctcaccacgtgactggcagcgactcatcaacaacaactggggattccggcctaagcgactcaacttcaagctcttcaacattcaggtcaaagaggttacggacaacaatggagttaagaccatcgccaataaccttaccagcacggtccaggtcttcacggactcagactatcagctcccgtacgtgctcgggtcggctcacgagggctgcctcccgccgttcccagcggacgttttca

SEQ ID NO: 1280 - protein, 197 aa, synthetic construct
  REGION 1..197: note = Adeno Associated Virus AAP Protein Variant
LATQSQSQTLNQSENLPQPPQVWDLLQWLQAVAHQWQTITKVPMEWVVPREIGIAIPNGWGTESSPPAPEPGPCPPTTITSTSKSPTAHLEDLQMTTPTSATAPPGGILTSTDSTATSHHVTGSDSSTTTGDSGLSDSTSSSSTFRSKRLRTTMELRPSPITLPARSRSSRTQTISSRTCSGRLTRAASRRSQRTFS

SEQ ID NO: 1281 - DNA, 591 bp, synthetic construct
  misc_feature 1..591: note = Adeno Associated Virus AAP Protein Variant
  source 1..591: mol_type = other DNA
ctggcgacacagagtcagtcccagaccctcaaccaatcggagatcctcccgcagccccctcaggtgtgggatctcttacaatggcttcaggtggtggcgcaccagtggcagacaataacgaaggtgccgatggagtgggtagttcctcgggaaattggcattgcgattcccaatggctgggggacagagtcatcaccaccagcacccgaacctgggccctgcccacctacaacaatcacctctacaagcaaatctccaacagcacatctggaggatcttcaaatgacaacgcctacttcggctacagcaccccctgggggtattttgacttcaacagattccactgccacttctcaccacgtgactggcagcgactcatcaacaacaactggggattccggcctaagcgactcaacttcaagctcttcaacattcaggtcaaagaggttacggacaacaatggagtcaagaccatcgccaataaccttaccagcacggtccaggtcttcacggactcagactatcagctcccgtacgtgctcgggtcggctcacgagggctgcctcccgccgttcccagcggacgttttca

SEQ ID NO: 1282 - protein, 197 aa, synthetic construct
  REGION 1..197: note = Adeno Associated Virus AAP Protein Variant
LATQSQSQTLNQSEILPQPPQVWDLLQWLQVVAHQWQTITKVPMEWVVPREIGIAIPNGWGTESSPPAPEPGPCPPTTITSTSKSPTAHLEDLQMTTPTSATAPPGGILTSTDSTATSHHVTGSDSSTTTGDSGLSDSTSSSSTFRSKRLRTTMESRPSPITLPARSRSSRTQTISSRTCSGRLTRAASRRSQRTFS

SEQ ID NO: 1283 - DNA, 591 bp, synthetic construct
  misc_feature 1..591: note = Adeno Associated Virus AAP Protein Variant
  source 1..591: mol_type = other DNA
ctggcgacacagagtcagtcccagaccctcaaccaatcggagaacctcccgcagccccctcaggtgtgggatctcttacaatggcttcaggtggtggcgcaccagtggcagacaataacgaaggtgccgatggagtgggtagttcctcgggaaattggcattgcgattcccaatggctgggggacagagtcatcaccaccagcacccgaacctgggccctgcccacctacaacaatcacctctacaagcaaatctccaacagcacatctggaggatcttcaaatgacaacgcctacttcggctacagcaccccctgggggtattttgacttcaacagattccactgccacttctcaccacgtgactggcagcgactcatcaacaacaactggggattccggcctaagcgactcaacttcaagctcttcaacattcaggtcaaagaggttacggacaacaatggagtcaagatcatcgccaataaccttaccagcacggtccaggtcttcacggactcagactatcagctcccgtacgtgctcgggtcggctcacgagggctgcctcccgccgttcccagcggacgttttca

SEQ ID NO: 1284 - protein, 197 aa, synthetic construct
  REGION 1..197: note = Adeno Associated Virus AAP Protein Variant
LATQSQSQTLNQSENLPQPPQVWDLLQWLQVVAHQWQTITKVPMEWVVPREIGIAIPNGWGTESSPPAPEPGPCPPTTITSTSKSPTAHLEDLQMTTPTSATAPPGGILTSTDSTATSHHVTGSDSSTTTGDSGLSDSTSSSSTFRSKRLRTTMESRSSPITLPARSRSSRTQTISSRTCSGRLTRAASRRSQRTFS

SEQ ID NO: 1285 - DNA, 591 bp, synthetic construct
  misc_feature 1..591: note = Adeno Associated Virus AAP Protein Variant
  source 1..591: mol_type = other DNA
ctggcgacacagagtcagtcccagaccctcaaccaatcggagaacctcccgcagccccctcaggtgtgggatctcttacaatggcttcaggtggtggcgcaccagtggcagacaataacgaaggtgccgatggagtgggtagttcctcgggaaattggcattgcgattcccaatggctgggggacagagtcatcaccaccagcacccgaacctgggccctgcccacctacaacaatcacctctacactcaaatctccaacagcacatctggaggatcttcaaatgacaacgcctacttcggctacagcaccccctgggggtattttgacttcaacagattccactgccacttctcaccacgtgactggcagcgactcatcaacaacaactggggattccggcctaagcgactcaacttcaagctcttcaacattcaggtcaaagaggttacggacaacaatggagtcaagaccatcgccaataaccttaccagcacggtccaggtcttcacggactcagactatcagctcccgtacgtgctcgggtcggctcacgagggctgcctcccgccgttcccagcggacgttttca

SEQ ID NO: 1286 - protein, 197 aa, synthetic construct
  REGION 1..197: note = Adeno Associated Virus AAP Protein Variant
LATQSQSQTLNQSENLPQPPQVWDLLQWLQVVAHQWQTITKVPMEWVVPREIGIAIPNGWGTESSPPAPEPGPCPPTTITSTLKSPTAHLEDLQMTTPTSATAPPGGILTSTDSTATSHHVTGSDSSTTTGDSGLSDSTSSSSTFRSKRLRTTMESRPSPITLPARSRSSRTQTISSRTCSGRLTRAASRRSQRTFS

SEQ ID NO: 1287 - DNA, 591 bp, synthetic construct
  misc_feature 1..591: note = Adeno Associated Virus AAP Protein Variant
  source 1..591: mol_type = other DNA
ctggcgacacagagtcagtcccagaccctcaaccaatcggagaacctcccgcagccccctcaggtgtgggatctcttacaatggcttcaggtggtggcgcaccagtggcagacaataacgaaggtgccgatggagtgggtagttcctcgggaaattggcattgcgattcccaatggctgggggacagagtcatcaccaccagcacccgaacctgggccctgcccacctacaacaatcacctctacaagcaaatctccaacagcacatctggaggaatctcaaatgacaacgcctacttcggctacagcaccccctgggggtattttgacttcaacagattccactgccacttctcaccacgtgactggcagcgactcatcaacaacaactggggattccggcctaagcgactcaacttcaagctcttcaacattcaggtcaaagaggttacggacaacaatggagtcaagaccatcgccaataaccttaccagcacggtccaggtcttcacggactcagactatcagctcccgtacgtgctcgggtcggctcacgagggctgcctcccgccgttcccagcggacgttttca

SEQ ID NO: 1288 - protein, 197 aa, synthetic construct
  REGION 1..197: note = Adeno Associated Virus AAP Protein Variant
LATQSQSQTLNQSENLPQPPQVWDLLQWLQVVAHQWQTITKVPMEWVVPREIGIAIPNGWGTESSPPAPEPGPCPPTTITSTSKSPTAHLEESQMTTPTSATAPPGGILTSTDSTATSHHVTGSDSSTTTGDSGLSDSTSSSSTFRSKRLRTTMESRPSPITLPARSRSSRTQTISSRTCSGRLTRAASRRSQRTFS

SEQ ID NO: 1289 - DNA, 591 bp, synthetic construct
  misc_feature 1..591: note = Adeno Associated Virus AAP Protein Variant
  source 1..591: mol_type = other DNA
ctggcgacacagagtcagtcccagaccctcaaccaatcggagaacctcccgcagccccctcaggtgtgggatctcttacaatggcttcaggtggtggcgcaccagtggcagacgataacgaaggtgccgatggagtgggtagttcctcgggaaattggcattgcgattcccaatggctgggggacagagtcatcaccaccagcacccgaacctgggccctgcccacctacaacaatcacctctacaagcaaatctccaacagcacatctggaggatcttcaaatgacaacgcctacttcggctatagcaccccctgggggtattttgacttcaacagattccactgccacttctcaccacgtgactggcagcgactcatcaacaacaactggggattccggcctaagcgactcaacttcaagctcttcaacattcaggtcaaagaggttacggacaacaatggagtcaagaccatcgccaataaccttaccagcacggtccaggtcttcacggactcagactatcagctcccgtacgtgctcgggtcggctcacgagggctgcctcccgccgttcccagcggacgttttca

SEQ ID NO: 1290 - protein, 197 aa, synthetic construct
  REGION 1..197: note = Adeno Associated Virus AAP Protein Variant
LATQSQSQTLNQSENLPQPPQVWDLLQWLQVVAHQWQTITKVPMEWVVPREIGIAIPNGWGTESSPPAPEPGPCPPTTITSTSKSPTAHLEDLQMTTPTSAIAPPGGILTSTDSTATSHHVTGSDSSTTTGDSGLSDSTSSSSTFRSKRLRTTMESRPSPITLPARSRSSRTQTISSRTCSGRLTRAASRRSQRTFS

SEQ ID NO: 1291 - DNA, 591 bp, synthetic construct
  misc_feature 1..591: note = Adeno Associated Virus AAP Protein Variant
  source 1..591: mol_type = other DNA
ctggcgacacagagtcagtcccagaccctcaaccaatcggagaacctcccgcagccccctcaggtgtgggatctcttacaatggcttcaggtggtggcgcaccagtggcagacaataacgaaggtgccgatggagtgggtagttcctcgggaaattggcattgcgattcccaatggctgggggacagagtcatcaccaccagcacccgaacctgggccctgcccacctacaacaatcacctctacaagcaaatctccaacagcacatctggaggatcttcaaatgacaacgcctacttcggctacagcaccccctgggggtattttgacttcaacagattccactgccacttctcaccacgtgactggcagcgactcatcaacaacaactggggattccggcctaagcgactcaacttcaagctcttcaacattcaggtcaaagaggttacggacaacaatggacgtaagaccatcgccaataaccttaccagcacggtccaggtcttcacggactcagactatcagctcccgtacgtgctcgggtcggctcacgagggctgcctcccgccgttcccagcggacgttttca

SEQ ID NO: 1292 - protein, 197 aa, synthetic construct
  REGION 1..197: note = Adeno Associated Virus AAP Protein Variant
LATQSQSQTLNQSENLPQPPQVWDLLQWLQVVAHQWQTITKVPMEWVVPREIGIAIPNGWGTESSPPAPEPGPCPPTTITSTSKSPTAHLEDLQMTTPTSATAPPGGILTSTDSTATSHHVTGSDSSTTTGDSGLSDSTSSSSTFRSKRLRTTMDVRPSPITLPARSRSSRTQTISSRTCSGRLTRAASRRSQRTFS

SEQ ID NO: 1293 - DNA, 591 bp, synthetic construct
  misc_feature 1..591: note = Adeno Associated Virus AAP Protein Variant
  source 1..591: mol_type = other DNA
ctggcgacacagagtcagtcccagaccctcaaccaatcggagaacctcccgcagccccctcaggtgtgggatctcttacaatggcttcaggtggtggcgcaccagtggcagacaataacgaaggtgccgatggagtgggtagttcctcgggaaattggcattgcgattcccaatggctgggggacagagtcatcaccaccagcacccgaacctgggccctgcccacctacaacaatcacctctacaagcaaatctccaacagcacatctggaggatcttcaaatgacaacacctacttcggctacagcaccccctgggggtattttgacttcaacagattccactgccacttctcaccacgtgactggcagcgactcatcaacaacaactggggattccggcctaagcgactcaacttcaagctcttcaacattcaggtcaaagaggttacggacaacaatggagtcaagaccatcgccaataaccttaccagcacggtccaggtcttcacggactcagactatcagctcccgtacgtgctcgggtcggctcacgagggctgcctcccgccgttcccagcggacgttttca

SEQ ID NO: 1294 - protein, 197 aa, synthetic construct; identical to SEQ ID NO: 1234
  REGION 1..197: note = Adeno Associated Virus AAP Protein Variant

SEQ ID NO: 1295 - DNA, 591 bp, synthetic construct
  misc_feature 1..591: note = Adeno Associated Virus AAP Protein Variant
  source 1..591: mol_type = other DNA
ctggcgacacagagtcagtcccagaccctcaaccaatcggactacctcccgcagccccctcaggtgtgggatctcttacaatggcttcaggtggtggcgcaccagtggcagacaataacgaaggtgccgatggagtgggtagttcctcgggaaattggcattgcgattcccaatggctgggggacagagtcatcaccaccagcacccgaacctgggccctgcccacctacaacaatcacctctacaagcaaatctccaacagcacatctggaggatcttcaaatgacaacgcctacttcggctacagcaccccctgggggtattttgacttcaacagattccactgccacttctcaccacgtgactggcagcgactcatcaacaacaactggggattccggcctaagcgactcaacttcaagctcttcaacattcaggtcaaagaggttacggacaacaatggagtcaagaccatcgccaataaccttaccagcacggtccaggtcttcacggactcagactatcagctcccgtacgtgctcgggtcggctcacgagggctgcctcccgccgttcccagcggacgttttca

SEQ ID NO: 1296 - protein, 197 aa, synthetic construct
  REGION 1..197: note = Adeno Associated Virus AAP Protein Variant
LATQSQSQTLNQSDYLPQPPQVWDLLQWLQVVAHQWQTITKVPMEWVVPREIGIAIPNGWGTESSPPAPEPGPCPPTTITSTSKSPTAHLEDLQMTTPTSATAPPGGILTSTDSTATSHHVTGSDSSTTTGDSGLSDSTSSSSTFRSKRLRTTMESRPSPITLPARSRSSRTQTISSRTCSGRLTRAASRRSQRTFS

SEQ ID NO: 1297 - DNA, 591 bp, synthetic construct
  misc_feature 1..591: note = Adeno Associated Virus AAP Protein Variant
  source 1..591: mol_type = other DNA
ctggcgacacagagtcagtcccagaccctcaaccaatcggagaacctcccgcagccccctcaggtgtgggatctcttacaatggcttcaggtggtggcgcaccagtggcagacaataacgaaggtgccgatggagtgggtagttcctcgggaaattggcattgcgattcccaatggctgggggacagagtcatcaccaccagcacccgaacctgggccctgcccacctacaacaatcacctctacaagcaaatctccaacagcacatctggaggatcttcaaatgacaacgcctacttcggctacagcaccccctgggggtattttgacttcaacagattccactgccacttctcaccacgtgactggcagcgactcatcaacaacaactggggattccggcctaagcgactcaacttcaagctcttcaacattcaggtcaaagaggttacggacacgaatggagtcaagaccatcgccaataaccttaccagcacggtccaggtcttcacggactcagactatcagctcccgtacgtgctcgggtcggctcacgagggctgcctcccgccgttcccagcggacgttttca

SEQ ID NO: 1298 - protein, 197 aa, synthetic construct
  REGION 1..197: note = Adeno Associated Virus AAP Protein Variant
LATQSQSQTLNQSENLPQPPQVWDLLQWLQVVAHQWQTITKVPMEWVVPREIGIAIPNGWGTESSPPAPEPGPCPPTTITSTSKSPTAHLEDLQMTTPTSATAPPGGILTSTDSTATSHHVTGSDSSTTTGDSGLSDSTSSSSTFRSKRLRTRMESRPSPITLPARSRSSRTQTISSRTCSGRLTRAASRRSQRTFS

SEQ ID NO: 1299 - DNA, 591 bp, synthetic construct
  misc_feature 1..591: note = Adeno Associated Virus AAP Protein Variant
  source 1..591: mol_type = other DNA
ctggcgacacagagtcagtcccagaccctcaaccaatcggagaacctcccgcagccccctcaggtgtgggatctcttacaatggcttcaggtggtggcgcaccagtggcagacaataacgaaggtgccgatggagtgggtagttcctcgggaaattggcattgcgattcccaatggctgggggacagagtcatcaccaccagcacccgaacctgggccctgcccacctacaacaatcacctctacaagcaaatctccaacagcacatctggaggatcttcaaatgacaacgcctacttcggctacagcaccccctgggggtattttgacttcaacagattccactgccacttctcaccacgtgactggcagcgactcatcaacaacaactggggattccggcctaagcgactcaacttcaagctcttcaacattcaggtcaaagaggttacggacaacaatggagtcaagaccatcgccaataaccttaccagcacggtccaggtcttcacggactcagactatcagctcccgtacgtgctcgggtcggctcacgagggctgcctcccgccgttcccagccgacgttttca

SEQ ID NO: 1300 - protein, 197 aa, synthetic construct
  REGION 1..197: note = Adeno Associated Virus AAP Protein Variant
LATQSQSQTLNQSENLPQPPQVWDLLQWLQVVAHQWQTITKVPMEWVVPREIGIAIPNGWGTESSPPAPEPGPCPPTTITSTSKSPTAHLEDLQMTTPTSATAPPGGILTSTDSTATSHHVTGSDSSTTTGDSGLSDSTSSSSTFRSKRLRTTMESRPSPITLPARSRSSRTQTISSRTCSGRLTRAASRRSQPTFS

SEQ ID NO: 1301 - DNA, 591 bp, synthetic construct
  misc_feature 1..591: note = Adeno Associated Virus AAP Protein Variant
  source 1..591: mol_type = other DNA
ctggcgacacagagtcagtcccagaccctcaaccaatcggagaacctcccgcagccccctcaggtgtgggatctcttacaatggcttcaggtggtggcgcaccagtggcagacaataacgaaggtgccgatggagtgggtagttcctcgggaaattggcattgcgattcccaatggctgggggacagagtcatcaccaccagcacccgaacctgggccctgcccacctacaacaatcacctctacaagcaaatctccaacagcacatctggaggatcttcaaatgacaacgccttcttcggctacagcaccccctgggggtattttgacttcaacagattccactgccacttctcaccacgtgactggcagcgactcatcaacaacaactggggattccggcctaagcgactcaacttcaagctcttcaacattcaggtcaaagaggttacggacaacaatggagtcaagaccatcgccaataaccttaccagcacggtccaggtcttcacggactcagactatcagctcccgtacgtgctcgggtcggctcacgagggctgcctcccgccgttcccagcggacgttttca

SEQ ID NO: 1302 - protein, 197 aa, synthetic construct
  REGION 1..197: note = Adeno Associated Virus AAP Protein Variant
LATQSQSQTLNQSENLPQPPQVWDLLQWLQVVAHQWQTITKVPMEWVVPREIGIAIPNGWGTESSPPAPEPGPCPPTTITSTSKSPTAHLEDLQMTTPSSATAPPGGILTSTDSTATSHHVTGSDSSTTTGDSGLSDSTSSSSTFRSKRLRTTMESRPSPITLPARSRSSRTQTISSRTCSGRLTRAASRRSQRTFS

SEQ ID NO: 1303 - DNA, 591 bp, synthetic construct
  misc_feature 1..591: note = Adeno Associated Virus AAP Protein Variant
  source 1..591: mol_type = other DNA
ctggcgacacagagtcagtcccagaccctcaaccaatcggagaacctcccgcagccccctcaggtgtgggatctcttacaatggcttcaggtggtggcgcaccagtggcagacaataacgaaggtgccgatggagtgggtagttcctcgggaaattggcattgcgattcccaatggctgggggacagagtcatcaccaccagcacccgaacctgggccctgcccacctacaacaatcacctctacaagcaaatctccaacagcacatctggaggatcttcaaatgacaacgcctacttcggctacagcaccccctgggggtattttgacttcaacagattccactgccacttctcaccacgtgactggcagcgactcatcaacaacaactggggattccggcctaagcgactcaacttcaagctcttcaacattcaggtcaaagaggttacggacaacaatggagtcaagaatatcgccaataaccttaccagcacggtccaggtcttcacggactcagactatcagctcccgtacgtgctcgggtcggctcacgagggctgcctcccgccgttcccagcggacgttttca

SEQ ID NO: 1304 - protein, 197 aa, synthetic construct
  REGION 1..197: note = Adeno Associated Virus AAP Protein Variant
LATQSQSQTLNQSENLPQPPQVWDLLQWLQVVAHQWQTITKVPMEWVVPREIGIAIPNGWGTESSPPAPEPGPCPPTTITSTSKSPTAHLEDLQMTTPTSATAPPGGILTSTDSTATSHHVTGSDSSTTTGDSGLSDSTSSSSTFRSKRLRTTMESRISPITLPARSRSSRTQTISSRTCSGRLTRAASRRSQRTFS

SEQ ID NO: 1305 - DNA, 591 bp, synthetic construct
  misc_feature 1..591: note = Adeno Associated Virus AAP Protein Variant
  source 1..591: mol_type = other DNA
ctggcgacacagagtcagtcccagaccctcaaccaatcggagaacctcccgcagccccctcaggtgtgggatctcttacaatggcttcaggtggtggcgcaccagtggcagacaataacgaaggtgccgatggagtgggtagttcctcgggaaattggcattgcgattcccaatggctgggggacagagtcatcaccaccagcacccgaacctgggccctgcccacctacaacaatcacctctacaagcaaatatccaacagcacatctggaggatcttcaaatgacaacgcctacttcggctacagcaccccctgggggtattttgacttcaacagattccactgccacttctcaccacgtgactggcagcgactcatcaacaacaactggggattccggcctaagcgactcaacttcaagctcttcaacattcaggtcaaagaggttacggacaacaatggagtcaagaccatcgccaataaccttaccagcacggtccaggtcttcacggactcagactatcagctcccgtacgtgctcgggtcggctcacgagggctgcctcccgccgttcccagcggacgttttca

SEQ ID NO: 1306 - protein, 197 aa, synthetic construct
  REGION 1..197: note = Adeno Associated Virus AAP Protein Variant
LATQSQSQTLNQSENLPQPPQVWDLLQWLQVVAHQWQTITKVPMEWVVPREIGIAIPNGWGTESSPPAPEPGPCPPTTITSTSKYPTAHLEDLQMTTPTSATAPPGGILTSTDSTATSHHVTGSDSSTTTGDSGLSDSTSSSSTFRSKRLRTTMESRPSPITLPARSRSSRTQTISSRTCSGRLTRAASRRSQRTFS

SEQ ID NO: 1307 - DNA, 591 bp, synthetic construct
  misc_feature 1..591: note = Adeno Associated Virus AAP Protein Variant
  source 1..591: mol_type = other DNA
ctggcgacacagagtcagtcccagaccctcaaccaatcggagaacctcccgcagccccctcaggtgtgggatctcttacaatggcttcaggtggtggcgcaccagtggcagacaataacgaaggtgccgatggagtgggtagttcctcgggaaattggcattgcgattcccaatggctgggggacagagtcatcaccaccagcacccgaacctgggccctgcccacctacaacaatcacctctacaagcaaatctccaacagcacatctggaggatcttcaaatgacaacgcctacttcggctacagcaccccctgggggtattttgacttcaacagattccactgccacttctcaccacgtgactggcagcgactcatcaacaacaactggggattccggcctaagcgactcaacttcaagctcttcaacattcaggtcaaagaggttacggacaacaatggaacaaagaccatcgccaataaccttaccagcacggtccaggtcttcacggactcagactatcagctcccgtacgtgctcgggtcggctcacgagggctgcctcccgccgttcccagcggacgttttca

SEQ ID NO: 1308 - protein, 197 aa, synthetic construct
  REGION 1..197: note = Adeno Associated Virus AAP Protein Variant
LATQSQSQTLNQSENLPQPPQVWDLLQWLQVVAHQWQTITKVPMEWVVPREIGIAIPNGWGTESSPPAPEPGPCPPTTITSTSKSPTAHLEDLQMTTPTSATAPPGGILTSTDSTATSHHVTGSDSSTTTGDSGLSDSTSSSSTFRSKRLRTTMEQRPSPITLPARSRSSRTQTISSRTCSGRLTRAASRRSQRTFS

SEQ ID NO: 1309 - DNA, 591 bp, synthetic construct
  misc_feature 1..591: note = Adeno Associated Virus AAP Protein Variant
  source 1..591: mol_type = other DNA
ctggcgacacagagtcagtcccagaccctcaaccaatcggagaacctcccgcagccccctcaggtgtgggatctcttacaatggcttcaggtggtggcgcaccagtggcagacaataacgaaggtgccgatggagtgggtagttcctcgggaaattggcattgcgattcccaatggctgggggacagagtcatcaccaccagcacccgaacctgggccctgcccacctacaacaatcacctctacaagcaaatctccaacagcacatctggaggatcttcaaatgacaacgcctacttcggctacagcaccccttgggggtattttgacttcaacagattccactgccacttctcaccacgtgactggcagcgactcatcaacaacaactggggattccggcctaagcgactcaacttcaagctcttcaacattcaggtcaaagaggttacggacaacaatggagtcaagaccatcgccaataaccttaccagcacggtccaggtcttcacggactcagactatcagctcccgtacgtgctcgggtcggctcacgagggctgcctcccgccgttcccagcggacgttttca

SEQ ID NO: 1310 - protein, 197 aa, synthetic construct
  REGION 1..197: note = Adeno Associated Virus AAP Protein Variant
LATQSQSQTLNQSENLPQPPQVWDLLQWLQVVAHQWQTITKVPMEWVVPREIGIAIPNGWGTESSPPAPEPGPCPPTTITSTSKSPTAHLEDLQMTTPTSATAPLGGILTSTDSTATSHHVTGSDSSTTTGDSGLSDSTSSSSTFRSKRLRTTMESRPSPITLPARSRSSRTQTISSRTCSGRLTRAASRRSQRTFS

SEQ ID NO: 1311 - DNA, 591 bp, synthetic construct
  misc_feature 1..591: note = Adeno Associated Virus AAP Protein Variant
  source 1..591: mol_type = other DNA
ctggcgacacagagtcagtcccagaccctcaaccaatcggatgccctcccgcagccccctcaggtgtgggatctcttacaatggcttcaggtggtggcgcaccagtggcagacaataacgaaggtgccgatggagtgggtagttcctcgggaaattggcattgcgattcccaatggctgggggacagagtcatcaccaccagcacccgaacctgggccctgcccacctacaacaatcacctctacaagcaaatctccaacagcacatctggaggatcttcaaatgacaacgcctacttcggctacagcaccccctgggggtattttgacttcaacagattccactgccacttctcaccacgtgactggcagcgactcatcaacaacaactggggattccggcctaagcgactcaacttcaagctcttcaacattcaggtcaaagaggttacggacaacaatggagtcaagaccatcgccaataaccttaccagcacggtccaggtcttcacggactcagactatcagctcccgtacgtgctcgggtcggctcacgagggctgcctcccgccgttcccagcggacgttttca

SEQ ID NO: 1312 - protein, 197 aa, synthetic construct
  REGION 1..197: note = Adeno Associated Virus AAP Protein Variant
LATQSQSQTLNQSDALPQPPQVWDLLQWLQVVAHQWQTITKVPMEWVVPREIGIAIPNGWGTESSPPAPEPGPCPPTTITSTSKSPTAHLEDLQMTTPTSATAPPGGILTSTDSTATSHHVTGSDSSTTTGDSGLSDSTSSSSTFRSKRLRTTMESRPSPITLPARSRSSRTQTISSRTCSGRLTRAASRRSQRTFS

SEQ ID NO: 1313 - DNA, 591 bp, synthetic construct
  misc_feature 1..591: note = Adeno Associated Virus AAP Protein Variant
  source 1..591: mol_type = other DNA
ctggcgacacagagtcagtcccagaccctcaaccaatcggagtccctcccgcagccccctcaggtgtgggatctcttacaatggcttcaggtggtggcgcaccagtggcagacaataacgaaggtgccgatggagtgggtagttcctcgggaaattggcattgcgattcccaatggctgggggacagagtcatcaccaccagcacccgaacctgggccctgcccacctacaacaatcacctctacaagcaaatctccaacagcacatctggaggatcttcaaatgacaacgcctacttcggctacagcaccccctgggggtattttgacttcaacagattccactgccacttctcaccacgtgactggcagcgactcatcaacaacaactggggattccggcctaagcgactcaacttcaagctcttcaacattcaggtcaaagaggttacggacaacaatggagtcaagaccatcgccaataaccttaccagcacggtccaggtcttcacggactcagactatcagctcccgtacgtgctcgggtcggctcacgagggctgcctcccgccgttcccagcggacgttttca

SEQ ID NO: 1314 - protein, 197 aa, synthetic construct
  REGION 1..197: note = Adeno Associated Virus AAP Protein Variant
LATQSQSQTLNQSESLPQPPQVWDLLQWLQVVAHQWQTITKVPMEWVVPREIGIAIPNGWGTESSPPAPEPGPCPPTTITSTSKSPTAHLEDLQMTTPTSATAPPGGILTSTDSTATSHHVTGSDSSTTTGDSGLSDSTSSSSTFRSKRLRTTMESRPSPITLPARSRSSRTQTISSRTCSGRLTRAASRRSQRTFS

SEQ ID NO: 1315 - DNA, 591 bp, synthetic construct
  misc_feature 1..591: note = Adeno Associated Virus AAP Protein Variant
  source 1..591: mol_type = other DNA
ctggcgacacagagtcagtcccagaccctcaaccaatcggagaacctcccgcagccccctcaggtgtgggatctcttacaatggcttcaggtggtggcgcaccagtggcagacaataacgaaggtgccgatggagtgggtagttcctcgggaaattggcattgcgattcccaatggctgggggacagagtcatcaccaccagcacccgaacctgggccctgcccacctacaacaatcacatctacaagcaaatctccaacagcacatctggaggatcttcaaatgacaacgcctacttcggctacagcaccccctgggggtattttgacttcaacagattccactgccacttctcaccacgtgactggcagcgactcatcaacaacaactggggattccggcctaagcgactcaacttcaagctcttcaacattcaggtcaaagaggttacggacaacaatggagtcaagaccatcgccaataaccttaccagcacggtccaggtcttcacggactcagactatcagctcccgtacgtgctcgggtcggctcacgagggctgcctcccgccgttcccagcggacgttttca

SEQ ID NO: 1316 - protein, 197 aa, synthetic construct; identical to SEQ ID NO: 1234
  REGION 1..197: note = Adeno Associated Virus AAP Protein Variant

SEQ ID NO: 1317 - DNA, 591 bp, synthetic construct
  misc_feature 1..591: note = Adeno Associated Virus AAP Protein Variant
  source 1..591: mol_type = other DNA
ctggcgacacagagtcagtcccagaccctcaaccaatcggagaacctcccgcagccccctcaggtgtgggatctcttacaatggcttcaggtggtggcgcaccagtggcagacaataacgaaggtgccgatggagtgggtagttcctcgggaaattggcattgcgattcccaatggctgggggacagagtcatcaccaccagcacccgaacctgggccctgcccacctacaacaatcacctctacaagcaaatctccaacagcacatctggaggatcttcaaatgacaacgcctacttcggctacagcaccccctgggggtattttgacttcaacagattccactgccacttctcaccacgtgactggcagcgactcatcaacaacaactggggattccggcctaagcgactcaacttcaagctcttcaacattcaggtcaaagaggttacggacaacaatggagtcaagaccgtcgccaataaccttaccagcacggtccaggtcttcacggactcagactatcagctcccgtacgtgctcgggtcggctcacgagggctgcctcccgccgttcccagcggacgttttca

SEQ ID NO: 1318 - protein, 197 aa, synthetic construct; identical to SEQ ID NO: 1234
  REGION 1..197: note = Adeno Associated Virus AAP Protein Variant

SEQ ID NO: 1319 - DNA, 591 bp, synthetic construct
  misc_feature 1..591: note = Adeno Associated Virus AAP Protein Variant
  source 1..591: mol_type = other DNA
ctggcgacacagagtcagtcccagaccctcaaccaatcggagaacctcccgcagccccctcaggtgtgggatctcttacaatggcttcaggtggtggcgcaccagtggcagacaataacgaaggtgccgatggagtgggtagttcctcgggaaattggcattgcgattcccaatggctgggggacagagtcatcaccaccagcacccgaacctgggccctgcccacctacaacaatcacctctacaagcaaatctccaacagctcatctggaggatcttcaaatgacaacgcctacttcggctacagcaccccctgggggtattttgacttcaacagattccactgccacttctcaccacgtgactggcagcgactcatcaacaacaactggggattccggcctaagcgactcaacttcaagctcttcaacattcaggtcaaagaggttacggacaacaatggagtcaagaccatcgccaataaccttaccagcacggtccaggtcttcacggactcagactatcagctcccgtacgtgctcgggtcggctcacgagggctgcctcccgccgttcccagcggacgttttca

SEQ ID NO: 1320 - protein, 197 aa, synthetic construct; identical to SEQ ID NO: 1234
  REGION 1..197: note = Adeno Associated Virus AAP Protein Variant

SEQ ID NO: 1321 - DNA, 591 bp, synthetic construct
  misc_feature 1..591: note = Adeno Associated Virus AAP Protein Variant
  source 1..591: mol_type = other DNA
ctggcgacacagagtcagtcccagaccctcaaccaatcggagaacctcccgcagccccctcaggtgtgggatctcttacaatggcttcaggtggtggcgcaccagtggcagacaataacgaaggtgccgatggagtgggtagttcctcgggaaattggcattgcgattcccaatggctgggggacagagtcatcaccaccagcacccgaacctgggccctgcccacctacaacaatcacctctacaagcaaatctccaacagcacatctggaggatcttcaaatgacggggcctacttcggctacagcaccccctgggggtattttgacttcaacagattccactgccacttctcaccacgtgactggcagcgactcatcaacaacaactggggattccggcctaagcgactcaacttcaagctcttcaacattcaggtcaaagaggttacggacaacaatggagtcaagaccatcgccaataaccttaccagcacggtccaggtcttcacggactcagactatcagctcccgtacgtgctcgggtcggctcacgagggctgcctcccgccgttcccagcggacgttttca

SEQ ID NO: 1322 - protein, 197 aa, synthetic construct
  REGION 1..197: note = Adeno Associated Virus AAP Protein Variant
LATQSQSQTLNQSENLPQPPQVWDLLQWLQVVAHQWQTITKVPMEWVVPREIGIAIPNGWGTESSPPAPEPGPCPPTTITSTSKSPTAHLEDLQMTGPTSATAPPGGILTSTDSTATSHHVTGSDSSTTTGDSGLSDSTSSSSTFRSKRLRTTMESRPSPITLPARSRSSRTQTISSRTCSGRLTRAASRRSQRTFS

SEQ ID NO: 1323 - DNA, 591 bp, synthetic construct
  misc_feature 1..591: note = Adeno Associated Virus AAP Protein Variant
  source 1..591: mol_type = other DNA
ctggcgacacagagtcagtcccagaccctcaaccaatcggagaacctcccgcagccccctcaggtgtgggacctcttacaatggcttcaggtggtggcgcaccagtggcagacaataacgaaggtgccgatggagtgggtagttcctcgggaaattggcattgcgattcccaatggctgggggacagagtcatcaccaccagcacccgaacctgggccctgcccacctacaacaatcacctctacaagcaaatctccaacagcacatctggaggatcttcaaatgacaacgcctacttcggctacagcaccccctgggggtattttgacttcaacagattccactgccacttctcaccacgtgactggcagcgactcatcaacaacaactggggattccggcctaagcgactcaacttcaagctcttcaacattcaggtcaaagaggttacggacaacaatggagtcaagaccatcgccaataaccttaccagcacggtccaggtcttcacggactcagactatcagctcccgtacgtgctcgggtcggctcacgagggctgcctcccgccgttcccagcggacgttttca

SEQ ID NO: 1324 - protein, 197 aa, synthetic construct; identical to SEQ ID NO: 1234
  REGION 1..197: note = Adeno Associated Virus AAP Protein Variant

SEQ ID NO: 1325 - DNA, 591 bp, synthetic construct
  misc_feature 1..591: note = Adeno Associated Virus AAP Protein Variant
  source 1..591: mol_type = other DNA
ctggcgacacagagtcagtcccagaccctcaaccaatcggagaacctcccgcagccccctcaggtgtgggatctcttacaatggcttcaggtggtggcgcaccagtggcagacaataacgaaggtgccgatggagtgggtagttcctcgggaaattggcattgcgattcccaatggctgggggacagagtcatcaccaccagcacccgaacctgggccctgcccacctacaacaatcacctctacaagcaaatctccaacagcacatctggaggatctacaaatgacaacgcctacttcggctacagcaccccctgggggtattttgacttcaacagattccactgccacttctcaccacgtgactggcagcgactcatcaacaacaactggggattccggcctaagcgactcaacttcaagctcttcaacattcaggtcaaagaggttacggacaacaatggagtcaagaccatcgccaataaccttaccagcacggtccaggtcttcacggactcagactatcagctcccgtacgtgctcgggtcggctcacgagggctgcctcccgccgttcccagcggacgttttca

SEQ ID NO: 1326 - protein, 197 aa, synthetic construct; identical to SEQ ID NO: 1234
  REGION 1..197: note = Adeno Associated Virus AAP Protein Variant

SEQ ID NO: 1327 - DNA, 591 bp, synthetic construct
  misc_feature 1..591: note = Adeno Associated Virus AAP Protein Variant
  source 1..591: mol_type = other DNA
ctggcgacacagagtcagtcccagaccctcaaccaatcggagaacctcccgcagccccctcaggtgtgggatctcttacaatggcttcaggtggtggcgcaccagtggcagacaataacgaaggtgccgatggagtgggtagttcctcgggaaattggcattgcgattcccaatggctgggggacagagtcatcaccaccagcacccgaacctgggccctgcccacctacaacaatcacctctacaagcaaatctccaacgctacatctggaggatcttcaaatgacaacgcctacttcggctacagcaccccctgggggtattttgacttcaacagattccactgccacttctcaccacgtgactggcagcgactcatcaacaacaactggggattccggcctaagcgactcaacttcaagctcttcaacattcaggtcaaagaggttacggacaacaatggagtcaagaccatcgccaataaccttaccagcacggtccaggtcttcacggactcagactatcagctcccgtacgtgctcgggtcggctcacgagggctgcctcccgccgttcccagcggacgttttca

SEQ ID NO: 1328 - protein, 197 aa, synthetic construct
  REGION 1..197: note = Adeno Associated Virus AAP Protein Variant
LATQSQSQTLNQSENLPQPPQVWDLLQWLQVVAHQWQTITKVPMEWVVPREIGIAIPNGWGTESSPPAPEPGPCPPTTITSTSKSPTLHLEDLQMTTPTSATAPPGGILTSTDSTATSHHVTGSDSSTTTGDSGLSDSTSSSSTFRSKRLRTTMESRPSPITLPARSRSSRTQTISSRTCSGRLTRAASRRSQRTFS

SEQ ID NO: 1329 - DNA, 591 bp, synthetic construct
  misc_feature 1..591: note = Adeno Associated Virus AAP Protein Variant
  source 1..591: mol_type = other DNA
ctggcgacacagagtcagtcccagaccctcaaccaatcggagaacctcccgcagccccctcaggtgtgggatctcttacaatggcttcaggtggtggcgcaccagtggcagacaataacgaaggtgccgatggagtgggtagttcctcgggaaattggcattgcgattcccaatggctgggggacagagtcatcaccaccagcacccgaacctgggccctgcccacctacaacaatcacctctacaagcaaatctccaacagcacatctggaggatcttcactggacaacgcctacttcggctacagcaccccctgggggtattttgacttcaacagattccactgccacttctcaccacgtgactggcagcgactcatcaacaacaactggggattccggcctaagcgactcaacttcaagctcttcaacattcaggtcaaagaggttacggacaacaatggagtcaagaccatcgccaataaccttaccagcacggtccaggtcttcacggactcagactatcagctcccgtacgtgctcgggtcggctcacgagggctgcctcccgccgttcccagcggacgttttca

SEQ ID NO: 1330 - protein, 197 aa, synthetic construct
  REGION 1..197: note = Adeno Associated Virus AAP Protein Variant
LATQSQSQTLNQSENLPQPPQVWDLLQWLQVVAHQWQTITKVPMEWVVPREIGIAIPNGWGTESSPPAPEPGPCPPTTITSTSKSPTAHLEDLHWTTPTSATAPPGGILTSTDSTATSHHVTGSDSSTTTGDSGLSDSTSSSSTFRSKRLRTTMESRPSPITLPARSRSSRTQTISSRTCSGRLTRAASRRSQRTFS

SEQ ID NO: 1331 - DNA, 591 bp, synthetic construct
  misc_feature 1..591: note = Adeno Associated Virus AAP Protein Variant
  source 1..591: mol_type = other DNA
ctggcgacacagagtcagtcccagaccctcaaccaatcggagaacctcccgcagccccctcaggtgtgggatctcttacaatggcttcaggtggtggcgcaccagtggcagacaataacgaaggtgccgatggagtgggtagttcctcgggaaattggcattgcgattcccaatggctgggggacagagtcatcaccaccagcacccgaacctgggccctgcccacctacaacaatcacctctacaagcaaatctccaactctacatctggaggatcttcaaatgacaacgcctacttcggctacagcaccccctgggggtattttgacttcaacagattccactgccacttctcaccacgtgactggcagcgactcatcaacaacaactggggattccggcctaagcgactcaacttcaagctcttcaacattcaggtcaaagaggttacggacaacaatggagtcaagaccatcgccaataaccttaccagcacggtccaggtcttcacggactcagactatcagctcccgtacgtgctcgggtcggctcacgagggctgcctcccgccgttcccagcggacgttttca

SEQ ID NO: 1332 - protein, 197 aa, synthetic construct; identical to SEQ ID NO: 1328
  REGION 1..197: note = Adeno Associated Virus AAP Protein Variant

SEQ ID NO: 1333 - DNA, 591 bp, synthetic construct
  misc_feature 1..591: note = Adeno Associated Virus AAP Protein Variant
  source 1..591: mol_type = other DNA
ctggcgacacagagtcagtcccagaccctcaaccaatcggagaacctcccgcagccccctcaggtgtgggatctcttacaatggcttcaggtggtggcgcaccagtggcagacaataacgaaggtgccgatggagtgggtagttcctcgggaaattggcattgcgattcccaatggctgggggacagagtcatcaccaccagcacccgaacctgggccctgcccacctacaacaatcacctctacaagcaaatctccaacactacatctggaggatcttcaaatgacaacgcctacttcggctacagcaccccctgggggtattttgacttcaacagattccactgccacttctcaccacgtgactggcagcgactcatcaacaacaactggggattccggcctaagcgactcaacttcaagctcttcaacattcaggtcaaagaggttacggacaacaatggagtcaagaccatcgccaataaccttaccagcacggtccaggtcttcacggactcagactatcagctcccgtacgtgctcgggtcggctcacgagggctgcctcccgccgttcccagcggacgttttca

SEQ ID NO: 1334 - protein, 197 aa, synthetic construct; identical to SEQ ID NO: 1328
  REGION 1..197: note = Adeno Associated Virus AAP Protein Variant

SEQ ID NO: 1335 - DNA, 591 bp, synthetic construct
  misc_feature 1..591: note = Adeno Associated Virus AAP Protein Variant
  source 1..591: mol_type = other DNA
ctggcgacacagagtcagtcccagaccctcaaccaatcggagaacctcccgcagccccctcaggtgtgggatctcttacaatggcttcaggtggtggcgcaccagtggcagacaataacgaaggtgccgatggagtgggtagttcctcgggaaattggcattgcgattcccaatggctgggggacagagtcatcaccaccagcacccgaacctgggccctgcccacctacaacaatcacctctacaagcaaatctccaacagcacatctggattgtcttcaaatgacaacgcctacttcggctacagcaccccctgggggtattttgacttcaacagattccactgccacttctcaccacgtgactggcagcgactcatcaacaacaactggggattccggcctaagcgactcaacttcaagctcttcaacattcaggtcaaagaggttacggacaacaatggagtcaagaccatcgccaataaccttaccagcacggtccaggtcttcacggactcagactatcagctcccgtacgtgctcgggtcggctcacgagggctgcctcccgccgttcccagcggacgttttca

SEQ ID NO: 1336 - protein, 197 aa, synthetic construct
  REGION 1..197: note = Adeno Associated Virus AAP Protein Variant
LATQSQSQTLNQSENLPQPPQVWDLLQWLQVVAHQWQTITKVPMEWVVPREIGIAIPNGWGTESSPPAPEPGPCPPTTITSTSKSPTAHLDCLQMTTPTSATAPPGGILTSTDSTATSHHVTGSDSSTTTGDSGLSDSTSSSSTFRSKRLRTTMESRPSPITLPARSRSSRTQTISSRTCSGRLTRAASRRSQRTFS

SEQ ID NO: 1337 - DNA, 591 bp, synthetic construct
  misc_feature 1..591: note = Adeno Associated Virus AAP Protein Variant
  source 1..591: mol_type = other DNA
ctggcgacacagagtcagtcccagaccctcaaccaatcggagaacctcccgcagccccctcaggtgtgggatctcttacaatggcttcaggtggtggcgcaccagtggcagacaataacgaaggtgccgatggagtgggtagttcctcgggaaattggcattgcgattcccaatggctgggggacagagtcatcaccaccagcacccgaacctgggccctgcccacctacaacaatcacctctacaagcaaatctccaacagcacatctggaggatcttcaaatgacaacgcctactttggctacagcaccccctgggggtattttgacttcaacagattccactgccacttctcaccacgtgactggcagcgactcatcaacaacaactggggattccggcctaagcgactcaacttcaagctcttcaacattcaggtcaaagaggttacggacaacaatggagtcaagaccatcgccaataaccttaccagcacggtccaggtcttcacggactcagactatcagctcccgtacgtgctcgggtcggctcacgagggctgcctcccgccgttcccagcggacgttttca

SEQ ID NO: 1338 - protein, 197 aa, synthetic construct
  REGION 1..197: note = Adeno Associated Virus AAP Protein Variant
LATQSQSQTLNQSENLPQPPQVWDLLQWLQVVAHQWQTITKVPMEWVVPREIGIAIPNGWGTESSPPAPEPGPCPPTTITSTSKSPTAHLEDLQMTTPTLATAPPGGILTSTDSTATSHHVTGSDSSTTTGDSGLSDSTSSSSTFRSKRLRTTMESRPSPITLPARSRSSRTQTISSRTCSGRLTRAASRRSQRTFS

SEQ ID NO: 1339 - DNA, 591 bp, synthetic construct
  misc_feature 1..591: note = Adeno Associated Virus AAP Protein Variant
  source 1..591: mol_type = other DNA
ctggcgacacagagtcagtcccagaccctcaaccaatcggagaacctcccgcagccccctcaggtgtgggatctcttacaatggcttcaggtggtggcgcatcagtggcagacaataacgaaggtgccgatggagtgggtagttcctcgggaaattggcattgcgattcccaatggctgggggacagagtcatcaccaccagcacccgaacctgggccctgcccacctacaacaatcacctctacaagcaaatctccaacagcacatctttcggatcttcaaatgacaacgcctacttcggctacagcaccccctgggggtattttgacttcaacagattccactgccacttctcaccacgtgactggcagcgactcatcaacaacaactggggattccggcctaagcgactcaacttcaagctcttcaacattcaggtcaaagaggttacggacaacaatggagtcaagaccatcgccaataaccttaccagcacggtccaggtcttcacggactcagactatcagctcccgtacgtgctcgggtcggctcacgagggctgcctcccgccgttcccagcggacgttttca

SEQ ID NO: 1340 - protein, 197 aa, synthetic construct
  REGION 1..197: note = Adeno Associated Virus AAP Protein Variant
LATQSQSQTLNQSENLPQPPQVWDLLQWLQVVAHQWQTITKVPMEWVVPREIGIAIPNGWGTESSPPAPEPGPCPPTTITSTSKSPTAHLSDLQMTTPTSATAPPGGILTSTDSTATSHHVTGSDSSTTTGDSGLSDSTSSSSTFRSKRLRTTMESRPSPITLPARSRSSRTQTISSRTCSGRLTRAASRRSQRTFS

SEQ ID NO: 1341 - DNA, 591 bp, synthetic construct
  misc_feature 1..591: note = Adeno Associated Virus AAP Protein Variant
  source 1..591: mol_type = other DNA
ctggcgacacagagtcagtcccagaccctcaaccaatcggagaacctcccgcagccccctcaggtgtgggatctcttacaatggcttcaggtggtggcgcaccagtggcagacaataacgaaggtgccgatggagtgggtagttcctcgggaaattggcattgcgattcccaatggctgggggacagagtcatcaccaccagcacccgaacctgggccctgcccacctacaacaatcacctctacaagcaaatctccaacagcacatctggaggttcttcaaatgacaacgcctacttcggctacagcaccccctgggggtattttgacttcaacagattccactgccacttctcaccacgtgactggcagcgactcatcaacaacaactggggattccggcctaagcgactcaacttcaagctcttcaacattcaggtcaaagaggttacggacaacaatggagtcaagaccatcgccaataaccttaccagcacggtccaggtcttcacggactcagactatcagctcccgtacgtgctcgggtcggctcacgagggctgcctcccgccgttcccagcggacgttttca

SEQ ID NO: 1342 - protein, 197 aa, synthetic construct
  REGION 1..197: note = Adeno Associated Virus AAP Protein Variant
LATQSQSQTLNQSENLPQPPQVWDLLQWLQVVAHQWQTITKVPMEWVVPREIGIAIPNGWGTESSPPAPEPGPCPPTTITSTSKSPTAHLEVLQMTTPTSATAPPGGILTSTDSTATSHHVTGSDSSTTTGDSGLSDSTSSSSTFRSKRLRTTMESRPSPITLPARSRSSRTQTISSRTCSGRLTRAASRRSQRTFS

SEQ ID NO: 1343 - DNA, 591 bp, synthetic construct
  misc_feature 1..591: note = Adeno Associated Virus AAP Protein Variant
  source 1..591: mol_type = other DNA
ctggcgacacagagtcagtcccagaccctcaaccaatcggagaacctcccgcagccccctcaggtgtgggatctcttacaatggcttcaggtggtggcgcaccagtggcagacaataacgaaggtgccgatggagtgggtagttcctcgggaaattggcattgcgattcccaatggctgggggacagagtcatcaccaccagcacccgaacctgggccctgcccacctacaacaatcacctctacaagaagatctccaacagcacatctggaggatcttcaaatgacaacgcctacttcggctacagcaccccctgggggtattttgacttcaacagattccactgccacttctcaccacgtgactggcagcgactcatcaacaacaactggggattccggcctaagcgactcaacttcaagctcttcaacattcaggtcaaagaggttacggacaacaatggagtcaagaccatcgccaataaccttaccagcacggtccaggtcttcacggactcagactatcagctcccgtacgtgctcgggtcggctcacgagggctgcctcccgccgttcccagcggacgttttca

SEQ ID NO: 1344 - protein, 197 aa, synthetic construct
  REGION 1..197: note = Adeno Associated Virus AAP Protein Variant
LATQSQSQTLNQSENLPQPPQVWDLLQWLQVVAHQWQTITKVPMEWVVPREIGIAIPNGWGTESSPPAPEPGPCPPTTITSTRRSPTAHLEDLQMTTPTSATAPPGGILTSTDSTATSHHVTGSDSSTTTGDSGLSDSTSSSSTFRSKRLRTTMESRPSPITLPARSRSSRTQTISSRTCSGRLTRAASRRSQRTFS

SEQ ID NO: 1345 - DNA, 591 bp, synthetic construct
  misc_feature 1..591: note = Adeno Associated Virus AAP Protein Variant
  source 1..591: mol_type = other DNA
ctggcgacacagagtcagtcccagaccctcaaccaatcggagaacctcccgcagccccctcaggtgtgggatctcttacaatggcttcaggtggtggcgcaccagtggcagacaataacgaaggtgccgatggagtgggtagttcctcgggaaattggcattgcgattcccaatggctgggggacagagtcatcaccaccagcacccgaacctgggccctgcccacctacaacaatcacctctacaagcaaatctccaacagcacatctggactctcttcaaatgacaacgcctacttcggctacagcaccccctgggggtattttgacttcaacagattccactgccacttctcaccacgtgactggcagcgactcatcaacaacaactggggattccggcctaagcgactcaacttcaagctcttcaacattcaggtcaaagaggttacggacaacaatggagtcaagaccatcgccaataaccttaccagcacggtccaggtcttcacggactcagactatcagctcccgtacgtgctcgggtcggctcacgagggctgcctcccgccgttcccagcggacgttttca

SEQ ID NO: 1346 - protein, 197 aa, synthetic construct
  REGION 1..197: note = Adeno Associated Virus AAP Protein Variant
LATQSQSQTLNQSENLPQPPQVWDLLQWLQVVAHQWQTITKVPMEWVVPREIGIAIPNGWGTESSPPAPEPGPCPPTTITSTSKSPTAHLDSLQMTTPTSATAPPGGILTSTDSTATSHHVTGSDSSTTTGDSGLSDSTSSSSTFRSKRLRTTMESRPSPITLPARSRSSRTQTISSRTCSGRLTRAASRRSQRTFS

SEQ ID NO: 1347 - DNA, 591 bp, synthetic construct
  misc_feature 1..591: note = Adeno Associated Virus AAP Protein Variant
  source 1..591: mol_type = other DNA
ctggcgacacagagtcagtcccagaccctcaaccaatcggagaacctcccgcagccccctcaggtgtgggatctcttacaatggcttcaggtggtggcgcaccagtggcagacaataacgaaggtgccgatggagtgggtagttcctcgggaaattggcattgcgattcccaatggctgggggacagagtcatcaccaccagcacccgaacctgggccctgcccacctacaacaatcacctctacaagcaaatctccaacacgacatctggaggatcttcaaatgacaacgcctacttcggctacagcaccccctgggggtattttgacttcaacagattccactgccacttctcaccacgtgactggcagcgactcatcaacaacaactggggattccggcctaagcgactcaacttcaagctcttcaacattcaggtcaaagaggttacggacaacaatggagtcaagaccatcgccaataaccttaccagcacggtccaggtcttcacggactcagactatcagctcccgtacgtgctcgggtcggctcacgagggctgcctcccgccgttcccagcggacgttttca

SEQ ID NO: 1348 - protein, 197 aa, synthetic construct
  REGION 1..197: note = Adeno Associated Virus AAP Protein Variant
LATQSQSQTLNQSENLPQPPQVWDLLQWLQVVAHQWQTITKVPMEWVVPREIGIAIPNGWGTESSPPAPEPGPCPPTTITSTSKSPTRHLEDLQMTTPTSATAPPGGILTSTDSTATSHHVTGSDSSTTTGDSGLSDSTSSSSTFRSKRLRTTMESRPSPITLPARSRSSRTQTISSRTCSGRLTRAASRRSQRTFS

SEQ ID NO: 1349 - DNA, 591 bp, synthetic construct
  misc_feature 1..591: note = Adeno Associated Virus AAP Protein Variant
  source 1..591: mol_type = other DNA
ctggcgacacagagtcagtcccagaccctcaaccaatcggagaacctcccgcagccccctcaggtgtgggatctcttacaatggcttcaggtggtggcgcaccagtggcagacaataacgaaggtgccgatggagtgggtagttcctcgggaaattggcattgcgattcccaatggctgggggacagagtcatcaccaccagcacccgaacctgggccctgcccacctacaacaatcacctctacaagagtatctccaacagcacatctggaggatcttcaaatgacaacgcctacttcggctacagcaccccctgggggtattttgacttcaacagattccactgccacttctcaccacgtgactggcagcgactcatcaacaacaactggggattccggcctaagcgactcaacttcaagctcttcaacattcaggtcaaagaggttacggacaacaatggagtcaagaccatcgccaataaccttaccagcacggtccaggtcttcacggactcagactatcagctcccgtacgtgctcgggtcggctcacgagggctgcctcccgccgttcccagcggacgttttca

SEQ ID NO: 1350 - protein, 197 aa, synthetic construct
  REGION 1..197: note = Adeno Associated Virus AAP Protein Variant
LATQSQSQTLNQSENLPQPPQVWDLLQWLQVVAHQWQTITKVPMEWVVPREIGIAIPNGWGTESSPPAPEPGPCPPTTITSTRVSPTAHLEDLQMTTPTSATAPPGGILTSTDSTATSHHVTGSDSSTTTGDSGLSDSTSSSSTFRSKRLRTTMESRPSPITLPARSRSSRTQTISSRTCSGRLTRAASRRSQRTFS

SEQ ID NO: 1351 - DNA, 591 bp, synthetic construct
  source 1..591: mol_type = other DNA
ctggcgacacagagtcagtcccagaccctcaaccaatcggagaacctcccgcagccccctcaggtgtgggatctcttacaatggcttcaggtggtggcgcaccagtggcagacaataacgaaggtgccgatggagtgggtagttcctcgggaaattggcattgcgattcccaatggctgggggacagagtcatcaccaccagcacccgaacctgggccctgcccacctacaacaatcacctctacaagcaaatctccaacagcacatctggaggatcttcaaatgacaacgcctacttcggctacagcaccccctgggggtattttgacttcaacagattccactgccacttctcaccacgtgactggcagcgactcatcaacaacaactggggattccggcctaagcgactcaacttcaagctcttcaacattcaggtcaaagaggttacggacaacaatggaaccaagaccatcgccaataaccttaccagcacggtccaggtcttcacggactcagactatcagctcccgtacgtgctcgggtcggctcacgagggctgcctcccgccgttcccagcggacgttttca

SEQ ID NO: 1352 - protein, 197 aa, synthetic construct
  REGION 1..197: note = Adeno Associated Virus AAP Protein Variant
LATQSQSQTLNQSENLPQPPQVWDLLQWLQVVAHQWQTITKVPMEWVVPREIGIAIPNGWGTESSPPAPEPGPCPPTTITSTSKSPTAHLEDLQMTTPTSATAPPGGILTSTDSTATSHHVTGSDSSTTTGDSGLSDSTSSSSTFRSKRLRTTMEPRPSPITLPARSRSSRTQTISSRTCSGRLTRAASRRSQRTFS

SEQ ID NO: 1353 - DNA, 591 bp, synthetic construct
  misc_feature 1..591: note = Adeno Associated Virus AAP Protein Variant
  source 1..591: mol_type = other DNA
ctggcgacacagagtcagtcccagaccctcaaccaatcggacaccctcccgcagccccctcaggtgtgggatctcttacaatggcttcaggtggtggcgcaccagtggcagacaataacgaaggtgccgatggagtgggtagttcctcgggaaattggcattgcgattcccaatggctgggggacagagtcatcaccaccagcacccgaacctgggccctgcccacctacaacaatcacctctacaagcaaatctccaacagcacatctggaggatcttcaaatgacaacgcctacttcggctacagcaccccctgggggtattttgacttcaacagattccactgccacttctcaccacgtgactggcagcgactcatcaacaacaactggggattccggcctaagcgactcaacttcaagctcttcaacattcaggtcaaagaggttacggacaacaatggagtcaagaccatcgccaataaccttaccagcacggtccaggtcttcacggactcagactatcagctcccgtacgtgctcgggtcggctcacgagggctgcctcccgccgttcccagcggacgttttca

SEQ ID NO: 1354 - protein, 197 aa, synthetic construct
  REGION 1..197: note = Adeno Associated Virus AAP Protein Variant
LATQSQSQTLNQSDTLPQPPQVWDLLQWLQVVAHQWQTITKVPMEWVVPREIGIAIPNGWGTESSPPAPEPGPCPPTTITSTSKSPTAHLEDLQMTTPTSATAPPGGILTSTDSTATSHHVTGSDSSTTTGDSGLSDSTSSSSTFRSKRLRTTMESRPSPITLPARSRSSRTQTISSRTCSGRLTRAASRRSQRTFS

SEQ ID NO: 1355 - DNA, 591 bp, synthetic construct
  misc_feature 1..591: note = Adeno Associated Virus AAP Protein Variant
  source 1..591: mol_type = other DNA
ctggcgacacagagtcagtcccagaccctcaaccaatcggagaacctcccgcagccccctcaggtgtgggatctcttacaatggcttcaggtggtggcgcaccagtggcagacaataacgaaggtgccgatggagtgggtagttcctcgggaaattggcattgcgattcccaatggctgggggacagagtcatcaccaccagcacccgaacctgggccctgcccacctacaacaatcacctctacaagcaaatctccaacagcacatctggaggatcttcaaatgacaacgcctacttcggctacagcaccccctgggggtattttgacttcaacagattccactgccacttctcaccacgtgactggcagcgactcatcaacaacaactggggattccggcctaagcgactcaacttcaagctcttcaacattcaggtcaaagaggttacggacaacaatggagtcaaggcgatcgccaataaccttaccagcacggtccaggtcttcacggactcagactatcagctcccgtacgtgctcgggtcggctcacgagggctgcctcccgccgttcccagcggacgttttca

SEQ ID NO: 1356 - protein, 197 aa, synthetic construct
  REGION 1..197: note = Adeno Associated Virus AAP Protein Variant
LATQSQSQTLNQSENLPQPPQVWDLLQWLQVVAHQWQTITKVPMEWVVPREIGIAIPNGWGTESSPPAPEPGPCPPTTITSTSKSPTAHLEDLQMTTPTSATAPPGGILTSTDSTATSHHVTGSDSSTTTGDSGLSDSTSSSSTFRSKRLRTTMESRRSPITLPARSRSSRTQTISSRTCSGRLTRAASRRSQRTFS

SEQ ID NO: 1357 - DNA, 591 bp, synthetic construct
  misc_feature 1..591: note = Adeno Associated Virus AAP Protein Variant
  source 1..591: mol_type = other DNA
ctggcgacacagagtcagtcccagaccctcaaccaatcggagaacctcccgcagccccctcaggtgtgggatctcttacaatggcttcaggtggtggcgcaccagtggcagacaataacgaaggtgccgatggagtgggtagttcctcgggaaattggcattgcgattcccaatggctgggggacagagtcatcaccaccagcacccgaacctgggccctgcccacctacaacaatcacctctacaagcaaatctccaacagcgagtctggaggatcttcaaatgacaacgcctacttcggctacagcaccccctgggggtattttgacttcaacagattccactgccacttctcaccacgtgactggcagcgactcatcaacaacaactggggattccggcctaagcgactcaacttcaagctcttcaacattcaggtcaaagaggttacggacaacaatggagtcaagaccatcgccaataaccttaccagcacggtccaggtcttcacggactcagactatcagctcccgtacgtgctcgggtcggctcacgagggctgcctcccgccgttcccagcggacgttttca

SEQ ID NO: 1358 - protein, 197 aa, synthetic construct
  REGION 1..197: note = Adeno Associated Virus AAP Protein Variant
LATQSQSQTLNQSENLPQPPQVWDLLQWLQVVAHQWQTITKVPMEWVVPREIGIAIPNGWGTESSPPAPEPGPCPPTTITSTSKSPTASLEDLQMTTPTSATAPPGGILTSTDSTATSHHVTGSDSSTTTGDSGLSDSTSSSSTFRSKRLRTTMESRPSPITLPARSRSSRTQTISSRTCSGRLTRAASRRSQRTFS

SEQ ID NO: 1359 - DNA, 591 bp, synthetic construct
  misc_feature 1..591: note = Adeno Associated Virus AAP Protein Variant
  source 1..591: mol_type = other DNA
ctggcgacacagagtcagtcccagaccctcaaccaatcggagaacctcccgcagccccctcaggtgtgggatctcttacaatggcttcaggtggtggcgcaccagtggcagacaataacgaaggtgccgatggagtgggtagttcctcgggaaattggcattgcgattcccaatggctgggggacagagtcatcaccaccagcacccgaacctgggccctgcccacctacaacaatcacctctacaagcaaatctccaacagcacatctggaggatcttcacatgacaacgcctacttcggctacagcaccccctgggggtattttgacttcaacagattccactgccacttctcaccacgtgactggcagcgactcatcaacaacaactggggattccggcctaagcgactcaacttcaagctcttcaacattcaggtcaaagaggttacggacaacaatggagtcaagaccatcgccaataaccttaccagcacggtccaggtcttcacggactcagactatcagctcccgtacgtgctcgggtcggctcacgagggctgcctcccgccgttcccagcggacgttttca

SEQ ID NO: 1360 - protein, 197 aa, synthetic construct
  REGION 1..197: note = Adeno Associated Virus AAP Protein Variant
LATQSQSQTLNQSENLPQPPQVWDLLQWLQVVAHQWQTITKVPMEWVVPREIGIAIPNGWGTESSPPAPEPGPCPPTTITSTSKSPTAHLEDLHMTTPTSATAPPGGILTSTDSTATSHHVTGSDSSTTTGDSGLSDSTSSSSTFRSKRLRTTMESRPSPITLPARSRSSRTQTISSRTCSGRLTRAASRRSQRTFS

SEQ ID NO: 1361 - DNA, 591 bp, synthetic construct
  misc_feature 1..591: note = Adeno Associated Virus AAP Protein Variant
  source 1..591: mol_type = other DNA
ctggcgacacagagtcagtcccagaccctcaaccaatcggagaacctcccgcagccccctcaggtgtgggatctcttacaatggcttcaggtggtggcgcaccagtggcagacaataacgaaggtgccgatggagtgggtagttcctcgggaaattggcattgcgattcccaatggctgggggacagagtcatcaccaccagcacccgaacctgggccctgcccacctacaacaatcacctctacaagcaaatctccaacagcacatctgttggatcttcaaatgacaacgcctacttcggctacagcaccccctgggggtattttgacttcaacagattccactgccacttctcaccacgtgactggcagcgactcatcaacaacaactggggattccggcctaagcgactcaacttcaagctcttcaacattcaggtcaaagaggttacggacaacaatggagtcaagaccatcgccaataaccttaccagcacggtccaggtcttcacggactcagactatcagctcccgtacgtgctcgggtcggctcacgagggctgcctcccgccgttcccagcggacgttttca

SEQ ID NO: 1362 - protein, 197 aa, synthetic construct
  REGION 1..197: note = Adeno Associated Virus AAP Protein Variant
LATQSQSQTLNQSENLPQPPQVWDLLQWLQVVAHQWQTITKVPMEWVVPREIGIAIPNGWGTESSPPAPEPGPCPPTTITSTSKSPTAHLLDLQMTTPTSATAPPGGILTSTDSTATSHHVTGSDSSTTTGDSGLSDSTSSSSTFRSKRLRTTMESRPSPITLPARSRSSRTQTISSRTCSGRLTRAASRRSQRTFS

SEQ ID NO: 1363 - DNA, 591 bp, synthetic construct
  misc_feature 1..591: note = Adeno Associated Virus AAP Protein Variant
  source 1..591: mol_type = other DNA
ctggcgacacagagtcagtcccagaccctcaaccaatcggagaacctcccgcagccccctcaggtgtgggatctcttacaatggcttcaggtggtggcgcaccagtggcagacaataacgaaggtgccgatggagtgggtagttcctcgggaaattggcattgcgattcccaatggctgggggacagagtcatcaccaccagcacccgaacctgggccctgcccacctacaacaatcacctctacaagcaaatctccaacagcacatctggagtctcttcaaatgacaacgcctacttcggctacagcaccccctgggggtattttgacttcaacagattccactgccacttctcaccacgtgactggcagcgactcatcaacaacaactggggattccggcctaagcgactcaacttcaagctcttcaacattcaggtcaaagaggttacggacaacaatggagtcaagaccatcgccaataaccttaccagcacggtccaggtcttcacggactcagactatcagctcccgtacgtgctcgggtcggctcacgagggctgcctcccgccgttcccagcggacgttttca

SEQ ID NO: 1364 - protein, 197 aa, synthetic construct
  REGION 1..197: note = Adeno Associated Virus AAP Protein Variant
LATQSQSQTLNQSENLPQPPQVWDLLQWLQVVAHQWQTITKVPMEWVVPREIGIAIPNGWGTESSPPAPEPGPCPPTTITSTSKSPTAHLESLQMTTPTSATAPPGGILTSTDSTATSHHVTGSDSSTTTGDSGLSDSTSSSSTFRSKRLRTTMESRPSPITLPARSRSSRTQTISSRTCSGRLTRAASRRSQRTFS

SEQ ID NO: 1365 - DNA, 591 bp, synthetic construct
  misc_feature 1..591: note = Adeno Associated Virus AAP Protein Variant
  source 1..591: mol_type = other DNA
ctggcgacacagagtcagtcccagaccctcaaccaatcggagaacctcccgcagccccctcaggtgtgggatctcttacaatggcttcaggtggtggcgcaccagtggcagacaataacgaaggtgccgatggagtgggtagttcctcgggaaattggcattgcgattcccaatggctgggggacagagtcatcaccaccagcacccgaacctgggccctgcccacctacaacaatcacctctacaagcaaatctccaacagcacatctggaggatcttcaccggacaacgcctacttcggctacagcaccccctgggggtattttgacttcaacagattccactgccacttctcaccacgtgactggcagcgactcatcaacaacaactggggattccggcctaagcgactcaacttcaagctcttcaacattcaggtcaaagaggttacggacaacaatggagtcaagaccatcgccaataaccttaccagcacggtccaggtcttcacggactcggactatcagctcccgtacgtgctcgggtcggctcacgagggctgcctcccgccgttcccagcggacgttttca

SEQ ID NO: 1366 - protein, 197 aa, synthetic construct
  REGION 1..197: note = Adeno Associated Virus AAP Protein Variant
LATQSQSQTLNQSENLPQPPQVWDLLQWLQVVAHQWQTITKVPMEWVVPREIGIAIPNGWGTESSPPAPEPGPCPPTTITSTSKSPTAHLEDLHRTTPTSATAPPGGILTSTDSTATSHHVTGSDSSTTTGDSGLSDSTSSSSTFRSKRLRTTMESRPSPITLPARSRSSRTRTISSRTCSGRLTRAASRRSQRTFS

SEQ ID NO: 1367 - DNA, 591 bp, synthetic construct
  misc_feature 1..591: note = Adeno Associated Virus AAP Protein Variant
  source 1..591: mol_type = other DNA
ctggcgacacagagtcagtcccagaccctcaaccaatcggagaacctcccgcagccccctcaggtgtgggatctcttacaatggcttcaggtggtggcgcaccagtggcagacaataacgaaggtgccgatggagtgggtagttcctcgggaaattggcattgcgattcccaatggctgggggacagagtcatcaccaccagcacccgaacctgggccctgcccacctacaacaatcacctctacaagcaaatctccaacagcaactctggaggatcttcaaatgacaacgcctacttcggctacagcaccccctgggggtattttgacttcaacagattccactgccacttctcaccacgtgactggcagcgactcatcaacaacaactggggattccggcctaagcgactcaacttcaagctcttcaacattcaggtcaaagaggttacggacaacaatggagtcaagaccatcgccaataaccttaccagcacggtccaggtcttcacggactcagactatcagctcccgtacgtgctcgggtcggctcacgagggctgcctcccgccgttcccagcggacgttttca

SEQ ID NO: 1368 - protein, 197 aa, synthetic construct
  REGION 1..197: note = Adeno Associated Virus AAP Protein Variant
LATQSQSQTLNQSENLPQPPQVWDLLQWLQVVAHQWQTITKVPMEWVVPREIGIAIPNGWGTESSPPAPEPGPCPPTTITSTSKSPTATLEDLQMTTPTSATAPPGGILTSTDSTATSHHVTGSDSSTTTGDSGLSDSTSSSSTFRSKRLRTTMESRPSPITLPARSRSSRTQTISSRTCSGRLTRAASRRSQRTFS

SEQ ID NO: 1369 - DNA, 591 bp, synthetic construct
  misc_feature 1..591: note = Adeno Associated Virus AAP Protein Variant
  source 1..591: mol_type = other DNA
ctggcgacacagagtcagtcccagaccctcaaccaatcggagaacctcccgcagccccctcaggtgtgggatctcttacaatggcttcaggtggtggcgcaccagtggcagacaataacgaaggtgccgatggagtgggtagttcctcgggaaattggcattgcgattcccaatggctgggggacagagtcatcaccaccagcacccgaacctgggccctgcccacctacaacaatcacctctacaagcaaatctccaacagcacatctatgggatcttcaaatgacaacgcctacttcggctacagcaccccctgggggtattttgacttcaacagattccactgccacttctcaccacgtgactggcagcgactcatcaacaacaactggggattccggcctaagcgactcaacttcaagctcttcaacattcaggtcaaagaggttacggacaacaatggagtcaagaccatcgccaataaccttaccagcacggtccaggtcttcacggactcagactatcagctcccgtacgtgctcgggtcggctcacgagggctgcctcccgccgttcccagcggacgttttca

SEQ ID NO: 1370 - protein, 197 aa, synthetic construct
  REGION 1..197: note = Adeno Associated Virus AAP Protein Variant
LATQSQSQTLNQSENLPQPPQVWDLLQWLQVVAHQWQTITKVPMEWVVPREIGIAIPNGWGTESSPPAPEPGPCPPTTITSTSKSPTAHLWDLQMTTPTSATAPPGGILTSTDSTATSHHVTGSDSSTTTGDSGLSDSTSSSSTFRSKRLRTTMESRPSPITLPARSRSSRTQTISSRTCSGRLTRAASRRSQRTFS

SEQ ID NO: 1371 - DNA, 591 bp, synthetic construct
  misc_feature 1..591: note = Adeno Associated Virus AAP Protein Variant
  source 1..591: mol_type = other DNA
ctggcgacacagagtcagtcccagaccctcaaccaatcggaagtcctcccgcagccccctcaggtgtgggatctcttacaatggcttcaggtggtggcgcaccagtggcagacaataacgaaggtgccgatggagtgggtagttcctcgggaaattggcattgcgattcccaatggctgggggacagagtcatcaccaccagcacccgaacctgggccctgcccacctacaacaatcacctctacaagcaaatctccaacagcacatctggaggatcttcaaatgacaacgcctacttcggctacagcaccccctgggggtattttgacttcaacagattccactgccacttctcaccacgtgactggcagcgactcatcaacaacaactggggattccggcctaagcgactcaacttcaagctcttcaacattcaggtcaaagaggttacggacaacaatggagtcaagaccatcgccaataaccttaccagcacggtccaggtcttcacggactcagactatcagctcccgtacgtgctcgggtcggctcacgagggctgcctcccgccgttcccagcggacgttttca

SEQ ID NO: 1372 - protein, 197 aa, synthetic construct
  REGION 1..197: note = Adeno Associated Virus AAP Protein Variant
LATQSQSQTLNQSEVLPQPPQVWDLLQWLQVVAHQWQTITKVPMEWVVPREIGIAIPNGWGTESSPPAPEPGPCPPTTITSTSKSPTAHLEDLQMTTPTSATAPPGGILTSTDSTATSHHVTGSDSSTTTGDSGLSDSTSSSSTFRSKRLRTTMESRPSPITLPARSRSSRTQTISSRTCSGRLTRAASRRSQRTFS

SEQ ID NO: 1373 - DNA, 591 bp, synthetic construct
  misc_feature 1..591: note = Adeno Associated Virus AAP Protein Variant
  source 1..591: mol_type = other DNA
ctggcgacacagagtcagtcccagaccctcaaccaatcggagaacctcccgcagccccctcaggtgtgggatctcttacaatggcttcaggtggtggcgcaccagtggcagacaataacgaaggtgccgatggagtgggtagttcctcgggaaattggcattgcgattcccaatggctgggggacagagtcatcaccaccagcacccgaacctgggccctgcccacctacaacaatcacctctacaagcaaatctccaacagcacatctggaggatcttcacaggacaacgcctacttcggctacagcaccccctgggggtattttgacttcaacagattccactgccacttctcaccacgtgactggcagcgactcatcaacaacaactggggattccggcctaagcgactcaacttcaagctcttcaacattcaggtcaaagaggttacggacaacaatggagtcaagaccatcgccaataaccttaccagcacggtccaggtcttcacggactcagactatcagctcccgtacgtgctcgggtcggctcacgagggctgcctcccgccgttcccagcggacgttttca

SEQ ID NO: 1374 - protein, 197 aa, synthetic construct
  REGION 1..197: note = Adeno Associated Virus AAP Protein Variant
LATQSQSQTLNQSENLPQPPQVWDLLQWLQVVAHQWQTITKVPMEWVVPREIGIAIPNGWGTESSPPAPEPGPCPPTTITSTSKSPTAHLEDLHRTTPTSATAPPGGILTSTDSTATSHHVTGSDSSTTTGDSGLSDSTSSSSTFRSKRLRTTMESRPSPITLPARSRSSRTQTISSRTCSGRLTRAASRRSQRTFS

SEQ ID NO: 1375 - DNA, 591 bp, synthetic construct
  misc_feature 1..591: note = Adeno Associated Virus AAP Protein Variant
  source 1..591: mol_type = other DNA
ctggcgacacagagtcagtcccagaccctcaaccaatcggagaacctcccgcagccccctcaggtgtgggatctcttacaatggcttcaggtggtggcgcaccagtggcagacaataacgaaggtgccgatggagtgggtagttcctcgggaaattggcattgcgattcccaatggctgggggacagagtcatcaccaccagcacccgaacctgggccctgcccacctacaacaatcacctctacaagcaaatctccaacagcacatctcaaggatcttcaaatgacaacgcctacttcggctacagcaccccctgggggtattttgacttcaacagattccactgccacttctcaccacgtgactggcagcgactcatcaacaacaactggggattccggcctaagcgactcaacttcaagctcttcaacattcaggtcaaagaggttacggacaacaatggagtcaagaccatcgccaataaccttaccagcacggtccaggtcttcacggactcagactatcagctcccgtacgtgctcgggtcggctcacgagggctgcctcccgccgttcccagcggacgttttca

SEQ ID NO: 1376 - protein, 197 aa, synthetic construct
  REGION 1..197: note = Adeno Associated Virus AAP Protein Variant
LATQSQSQTLNQSENLPQPPQVWDLLQWLQVVAHQWQTITKVPMEWVVPREIGIAIPNGWGTESSPPAPEPGPCPPTTITSTSKSPTAHLKDLQMTTPTSATAPPGGILTSTDSTATSHHVTGSDSSTTTGDSGLSDSTSSSSTFRSKRLRTTMESRPSPITLPARSRSSRTQTISSRTCSGRLTRAASRRSQRTFS

SEQ ID NO: 1377 - DNA, 591 bp, synthetic construct
  misc_feature 1..591: note = Adeno Associated Virus AAP Protein Variant
  source 1..591: mol_type = other DNA
ctggcgacacagagtcagtcccagaccctcaaccaatcggagaacctcccgcagccccctcaggtgtgggatctcttacaatggcttcaggtggtggcgcaccagtggcagacaataacgaaggtgccgatggagtgggtagttcctcgggaaattggcattgcgattcccaatggctgggggacagagtcatcaccaccagcacccgaacctgggccctgcccacctacaacaatcacctctacaagcaaatctccaacagcacatctctgggatcttcaaatgacaacgcctacttcggctacagcaccccctgggggtattttgacttcaacagattccactgccacttctcaccacgtgactggcagcgactcatcaacaacaactggggattccggcctaagcgactcaacttcaagctcttcaacattcaggtcaaagaggttacggacaacaatggagtcaagaccatcgccaataaccttaccagcacggtccaggtcttcacggactcagactatcagctcccgtacgtgctcgggtcggctcacgagggctgcctcccgccgttcccagcggacgttttca

SEQ ID NO: 1378 - protein, 197 aa, synthetic construct; identical to SEQ ID NO: 1370
  REGION 1..197: note = Adeno Associated Virus AAP Protein Variant

SEQ ID NO: 1379 - DNA, 591 bp, synthetic construct
  misc_feature 1..591: note = Adeno Associated Virus AAP Protein Variant
  source 1..591: mol_type = other DNA
ctggcgacacagagtcagtcccagaccctcaaccaatcggagaacctcccgcagccccctcaggtgtgggatctcttacaatggcttcaggtggtggcgcaccagtggcagacaataacgaaggtgccgatggagtgggtagttcctcgggaaattggcattgcgattcccaatggctgggggacagagtcatcaccaccagcacccgaacctgggccctgcccacctacaacaatcacctctacaagcaaatctccaacagcggttctggaggatcttcaaatgacaacgcctacttcggctacagcaccccctgggggtattttgacttcaacagattccactgccacttctcaccacgtgactggcagcgactcatcaacaacaactggggattccggcctaagcgactcaacttcaagctcttcaacattcaggtcaaagaggttacggacaacaatggagtcaagaccatcgccaataaccttaccagcacggtccaggtcttcacggactcagactatcagctcccgtacgtgctcgggtcggctcacgagggctgcctcccgccgttcccagcggacgttttca

SEQ ID NO: 1380 - protein, 197 aa, synthetic construct
  REGION 1..197: note = Adeno Associated Virus AAP Protein Variant
LATQSQSQTLNQSENLPQPPQVWDLLQWLQVVAHQWQTITKVPMEWVVPREIGIAIPNGWGTESSPPAPEPGPCPPTTITSTSKSPTAVLEDLQMTTPTSATAPPGGILTSTDSTATSHHVTGSDSSTTTGDSGLSDSTSSSSTFRSKRLRTTMESRPSPITLPARSRSSRTQTISSRTCSGRLTRAASRRSQRTFS

SEQ ID NO: 1381 - DNA, 591 bp, synthetic construct
  misc_feature 1..591: note = Adeno Associated Virus AAP Protein Variant
  source 1..591: mol_type = other DNA
ctggcgacacagagtcagtcccagaccctcaaccaatcggagaacctcccgcagccccctcaggtgtgggatctcttacaatggcttcaggtggtggcgcaccagtggcagacaataacgaaggtgccgatggagtgggtagttcctcgggaaattggcattgcgattcccaatggctgggggacagagtcatcaccaccagcacccgaacctgggccctgcccacctacaacaatcacctctacaagcaaatctccaacagcacatctggaggatcttcaaatgacaatgcctacttcggctacagcaccccctgggggtattttgacttcaacagattccactgccacttctcaccgcgtgactggcagcgactcatcaacaacaactggggattccggcctaagcgactcaacttcaagctcttcaacattcaggtcaaagaggttacggacaacaatggagtcaagaccatcgccaataaccttaccagcacggtccaggtcttcacggactcagactatcagctcccgtacgtgctcgggtcggctcacgagggctgcctcccgccgttcccagcggacgttttca

SEQ ID NO: 1382 - protein, 197 aa, synthetic construct
  REGION 1..197: note = Adeno Associated Virus AAP Protein Variant
LATQSQSQTLNQSENLPQPPQVWDLLQWLQVVAHQWQTITKVPMEWVVPREIGIAIPNGWGTESSPPAPEPGPCPPTTITSTSKSPTAHLEDLQMTMPTSATAPPGGILTSTDSTATSHRVTGSDSSTTTGDSGLSDSTSSSSTFRSKRLRTTMESRPSPITLPARSRSSRTQTISSRTCSGRLTRAASRRSQRTFS

SEQ ID NO: 1383 - DNA, 591 bp, synthetic construct
  misc_feature 1..591: note = Adeno Associated Virus AAP Protein Variant
  source 1..591: mol_type = other DNA
ctggcgacacagagtcagtcccagaccctcaaccaatcggagaacctcccgcagccccctcaggtgtgggatctcttacaatggcttcaggtggtggcgcaccagtggcagacaataacgaaggtgccgatggagtgggtagttcctcgggaaattggcattgcgattcccaatggctgggggacagagtcatcaccaccagcacccgaacctgggccctgcccacctacaacaatcacctctacaagcaaatctccaacagcacatctggaggatcttcaatggacaacgcctacttcggctacagcaccccctgggggtattttgacttcaacagattccactgccacttctcaccacgtgactggcagcgactcatcaacaacaactggggattccggcctaagcgactcaacttcaagctcttcaacattcaggtcaaagaggttacggacaacaatggagtcaagaccatcgccaataaccttaccagcacggtccaggtcttcacggactcagactatcagctcccgtacgtgctcgggtcggctcacgagggctgcctcccgccgttcccagcggacgttttca

SEQ ID NO: 1384 - protein, 197 aa, synthetic construct
  REGION 1..197: note = Adeno Associated Virus AAP Protein Variant
LATQSQSQTLNQSENLPQPPQVWDLLQWLQVVAHQWQTITKVPMEWVVPREIGIAIPNGWGTESSPPAPEPGPCPPTTITSTSKSPTAHLEDLQWTTPTSATAPPGGILTSTDSTATSHHVTGSDSSTTTGDSGLSDSTSSSSTFRSKRLRTTMESRPSPITLPARSRSSRTQTISSRTCSGRLTRAASRRSQRTFS

SEQ ID NO: 1385 - DNA, 591 bp, synthetic construct
  misc_feature 1..591: note = Adeno Associated Virus AAP Protein Variant
  source 1..591: mol_type = other DNA
ctggcgacacagagtcagtcccagaccctcaaccaatcggagaacctcccgcagccccctcaggtgtgggatctcttacaatggcttcaggtggtggcgcaccagtggcagacaataacgaaggtgccgatggagtgggtagttcctcgggaaattggcattgcgattcccaatggctgggggacagagtcatcaccaccagcacccgaacctgggccctgcccacctacaacaatcacctctacaagcaaatctccaacagcacatctggagcatcttcaaatgacaacgcctacttcggctacagcaccccctgggggtattttgacttcaacagattccactgccacttctcaccacgtgactggcagcgactcatcaacaacaactggggattccggcctaagcgactcaacttcaagctcttcaacattcaggtcaaagaggttacggacaacaatggagtcaagaccatcgccaataaccttaccagcacggtccaggtcttcacggactcagactatcagctcccgtacgtgctcgggtcggctcacgagggctgcctcccgccgttcccagcggacgttttca

SEQ ID NO: 1386 - protein, 197 aa, synthetic construct
  REGION 1..197: note = Adeno Associated Virus AAP Protein Variant
LATQSQSQTLNQSENLPQPPQVWDLLQWLQVVAHQWQTITKVPMEWVVPREIGIAIPNGWGTESSPPAPEPGPCPPTTITSTSKSPTAHLEHLQMTTPTSATAPPGGILTSTDSTATSHHVTGSDSSTTTGDSGLSDSTSSSSTFRSKRLRTTMESRPSPITLPARSRSSRTQTISSRTCSGRLTRAASRRSQRTFS

SEQ ID NO: 1387 - DNA, 591 bp, synthetic construct
  misc_feature 1..591: note = Adeno Associated Virus AAP Protein Variant
  source 1..591: mol_type = other DNA
ctggcgacacagagtcagtcccagaccctcaaccaatcggagaacctcccgcagccccctcaggtgtgggatctcttacaatggcttcaggtggtggcgcaccagtggcagacaataacgaaggtgccgatggagtgggtagttcctcgggaaattggcattgcgattcccaatggctgggggacagagtcatcaccaccagcacccgaacctgggccctgcccacctacaacaatcacctctacaagcaaatctccaacagcacatctggaggatcttcagcggacaacgcctacttcggctacagcaccccctgggggtattttgacttcaacagattccactgccacttctcaccacgtgactggcagcgactcatcaacaacaactggggattccggcctaagcgactcaacttcaagctcttcaacattcaggtcaaagaggttacggacaacaatggagtcaagaccatcgccaataaccttaccagcacggtccaggtcttcacggactcagactatcagctcccgtacgtgctcgggtcggctcacgagggctgcctcccgccgttcccagcggacgttttca

SEQ ID NO: 1388 - protein, 197 aa, synthetic construct
  REGION 1..197: note = Adeno Associated Virus AAP Protein Variant
LATQSQSQTLNQSENLPQPPQVWDLLQWLQVVAHQWQTITKVPMEWVVPREIGIAIPNGWGTESSPPAPEPGPCPPTTITSTSKSPTAHLEDLQRTTPTSATAPPGGILTSTDSTATSHHVTGSDSSTTTGDSGLSDSTSSSSTFRSKRLRTTMESRPSPITLPARSRSSRTQTISSRTCSGRLTRAASRRSQRTFS

SEQ ID NO: 1389 - DNA, 591 bp, synthetic construct
  misc_feature 1..591: note = Adeno Associated Virus AAP Protein Variant
  source 1..591: mol_type = other DNA
ctggcgacacagagtcagtcccagaccctcaaccaatcggagaacctcccgcagccccctcaggtgtgggatctcttacaatggcttcaggtggtggcgcaccagtggcagacaataacgaaggtgccgatggagtgggtagttcctcgggaaattggcattgcgattcccaatggctgggggacagagtcatcaccaccagcacccgaacctgggccctgcccacctacaacaatcacctctacaagcaaatctccaacagcacatctggaggatcttcaaatgacaacgcctacttcggctacagcaccccctgggggtattttgacttcaacagattccactgccacttctcaccacgtgactggcagcgactcatcaacaacaactggggattccggcctaagcgactcaacttcaagctcttcaacattcaggtcaaagaggttacggacaataatggagtcaagaccatcgccaataaccttaccagcacggtccaggtcttcacggactcagactatcagctcccgtacgtgctcgggtcggctcacgagggctgcctcccgccgttcccagcggacgttttca

SEQ ID NO: 1390 - protein, 197 aa, synthetic construct
  REGION 1..197: note = Adeno Associated Virus AAP Protein Variant
LATQSQSQTLNQSENLPQPPQVWDLLQWLQVVAHQWQTITKVPMEWVVPREIGIAIPNGWGTESSPPAPEPGPCPPTTITSTSKSPTAHLEDLQMTTPTSATAPPGGILTSTDSTATSHHVTGSDSSTTTGDSGLSDSTSSSSTFRSKRLRTIMESRPSPITLPARSRSSRTQTISSRTCSGRLTRAASRRSQRTFS

SEQ ID NO: 1391 - DNA, 591 bp, synthetic construct
  misc_feature 1..591: note = Adeno Associated Virus AAP Protein Variant
  source 1..591: mol_type = other DNA
ctggcgacacagagtcagtcccagaccctcaaccaatcggagaacctcccgcagccccctcaggtgtgggatctcttacaatggcttcaggtggtggcgcaccagtggcagacaataacgaaggtgccgatggagtgggtagttcctcgggaaattggcattgcgattcccaatggctgggggacagagtcatcaccaccagcacccgaacctgggccctgcccacctacaacaatcacctctacaagcaaatctccaacagcacatctggaggatcttcaaatgacaacgcctacttcggctacagcaccccctgggggtattttgacttcaacagattccactgccacttctcaccacgtgactggcagcgactcatcaacaacaactggggattccggcctaagcgactcaacttcaagctcttcaacattcaggtcaaagaggttacggacaacgggggagtcaagaccatcgccaataaccttaccagcacggtccaggtcttcacggactcagactatcagctcccgtacgtgctcgggtcggctcacgagggctgcctcccgccgttcccagcggacgttttca

SEQ ID NO: 1392 - protein, 197 aa, synthetic construct
  REGION 1..197: note = Adeno Associated Virus AAP Protein Variant
LATQSQSQTLNQSENLPQPPQVWDLLQWLQVVAHQWQTITKVPMEWVVPREIGIAIPNGWGTESSPPAPEPGPCPPTTITSTSKSPTAHLEDLQMTTPTSATAPPGGILTSTDSTATSHHVTGSDSSTTTGDSGLSDSTSSSSTFRSKRLRTTGESRPSPITLPARSRSSRTQTISSRTCSGRLTRAASRRSQRTFS

SEQ ID NO: 1393 - DNA, 591 bp, synthetic construct
  misc_feature 1..591: note = Adeno Associated Virus AAP Protein Variant
  source 1..591: mol_type = other DNA
ctggcgacacagagtcagtcccagaccctcaaccaatcggagaacctcccgcagccccctcaggtgtgggatctcttacaatggcttcaggtggtggcgcaccagtggcagacaataacgaaggtgccgatggagtgggtagttcctcgggaaattggcattgcgattcccaatggctgggggacagagtcatcaccaccagcacccgaacctgggccctgcccacctacaacaatcacctctacaagcaaatctccaacagcacatcttccggatcttcaaatgacaacgcctacttcggctacagcaccccctgggggtattttgacttcaacagattccactgccacttctcaccacgtgactggcagcgactcatcaacaacaactggggattccggcctaagcgactcaacttcaagctcttcaacattcaggtcaaagaggttacggacaacaatggagtcaagaccatcgccaataaccttaccagcacggtccaggtcttcacggactcagactatcagctcccgtacgtgctcgggtcggctcacgagggctgcctcccgccgttcccagcggacgttttca

SEQ ID NO: 1394 - protein, 197 aa, synthetic construct
  REGION 1..197: note = Adeno Associated Virus AAP Protein Variant
LATQSQSQTLNQSENLPQPPQVWDLLQWLQVVAHQWQTITKVPMEWVVPREIGIAIPNGWGTESSPPAPEPGPCPPTTITSTSKSPTAHLPDLQMTTPTSATAPPGGILTSTDSTATSHHVTGSDSSTTTGDSGLSDSTSSSSTFRSKRLRTTMESRPSPITLPARSRSSRTQTISSRTCSGRLTRAASRRSQRTFS

SEQ ID NO: 1395 - DNA, 591 bp, synthetic construct
  misc_feature 1..591: note = Adeno Associated Virus AAP Protein Variant
  source 1..591: mol_type = other DNA
ctggcgacacagagtcagtcccagaccctcaaccaatcggagaacctcccgcagccccctcaggtgtgggatctcttacaatggcttcaggtggtggcgcaccagtggcagacaataacgaaggtgccgatggagtgggtagttcctcgggaaattggcattgcgattcccaatggctgggggacagagtcatcaccaccagcacccgaacctgggccctgcccacctacaacaatcacctctacaagcaaatctccaacagcacatctggaggatcttcagtcgacaacgcctacttcggctacagcaccccctgggggtattttgacttcaacagattccactgccacttctcaccacgtgactggcagcgactcatcaacaacaactggggattccggcctaagcgactcaacttcaagctcttcaacattcaggtcaaagaggttacggacaacaatggagtcaagaccatcgccaataaccttaccagcacggtccaggtcttcacggactcagactatcagctcccgtacgtgctcgggtcggctcacgagggctgcctcccgccgttcccagcggacgttttca

SEQ ID NO: 1396 - protein, 197 aa, synthetic construct
  REGION 1..197: note = Adeno Associated Virus AAP Protein Variant
LATQSQSQTLNQSENLPQPPQVWDLLQWLQVVAHQWQTITKVPMEWVVPREIGIAIPNGWGTESSPPAPEPGPCPPTTITSTSKSPTAHLEDLQSTTPTSATAPPGGILTSTDSTATSHHVTGSDSSTTTGDSGLSDSTSSSSTFRSKRLRTTMESRPSPITLPARSRSSRTQTISSRTCSGRLTRAASRRSQRTFS

SEQ ID NO: 1397 - DNA, 591 bp, synthetic construct
  misc_feature 1..591: note = Adeno Associated Virus AAP Protein Variant
  source 1..591: mol_type = other DNA
ctggcgacacagagtcagtcccagaccctcaaccaatcggagaacctcccgcagccccctcaggtgtgggatctcttacaatggcttcaggtggtggcgcaccagtggcagacaataacgaaggtgccgatggagtgggtagttcctcgggaaattggcattgcgattcccaatggctgggggacagagtcatcaccaccagcacccgaacctgggccctgcccacctacaacaatcacctctacaagcaaatctccaactggacatctggaggatcttcaaatgacaacgcctacttcggctacagcaccccctgggggtattttgacttcaacagattccactgccacttctcaccacgtgactggcagcgactcatcaacaacaactggggattccggcctaagcgactcaacttcaagctcttcaacattcaggtcaaagaggttacggacaacaatggagtcaagaccatcgccaataaccttaccagcacggtccaggtcttcacggactcagactatcagctcccgtacgtgctcgggtcggctcacgagggctgcctcccgccgttcccagcggacgttttca

SEQ ID NO: 1398 - protein, 197 aa, synthetic construct
  REGION 1..197: note = Adeno Associated Virus AAP Protein Variant
LATQSQSQTLNQSENLPQPPQVWDLLQWLQVVAHQWQTITKVPMEWVVPREIGIAIPNGWGTESSPPAPEPGPCPPTTITSTSKSPTGHLEDLQMTTPTSATAPPGGILTSTDSTATSHHVTGSDSSTTTGDSGLSDSTSSSSTFRSKRLRTTMESRPSPITLPARSRSSRTQTISSRTCSGRLTRAASRRSQRTFS

SEQ ID NO: 1399 - DNA, 591 bp, synthetic construct
  misc_feature 1..591: note = Adeno Associated Virus AAP Protein Variant
  source 1..591: mol_type = other DNA
ctggcgacacagagtcagtcccagaccctcaaccaatcggagaacctcccgcagccccctcaggtgtgggatctcttacaatggcttcaggtggtggcgcaccagtggcagacaataacgaaggtgccgatggagtgggtagttcctcgggaaattggcattgcgattcccaatggctgggggacagagtcatcaccaccagcacccgaacctgggccctgcccacctacaacaatcacctctacaagcaaatctccaacagcacatctggaggatcttcaaatgacaacgcctacttcggctacagcaccccctgggggtattttgacttcaacagattccactgccacttctcaccacgtgactggcagcgactcatcaacaacaactggggattccggcctaagcgactcaacttcaagctcttcaacattcaggtcaaagaggttacggacaacaatggagtcaagacgatcgccaataaccttaccagcacggtccaggtcttcacggactcagactatcagctcccgtacgtgctcgggtcggctcacgagggctgcctcccgccgttcccagcggacgttttca

SEQ ID NO: 1400 - protein, 197 aa, synthetic construct; identical to SEQ ID NO: 1356
  REGION 1..197: note = Adeno Associated Virus AAP Protein Variant

SEQ ID NO: 1401 - DNA, 591 bp, synthetic construct
  misc_feature 1..591: note = Adeno Associated Virus AAP Protein Variant
  source 1..591: mol_type = other DNA
ctggcgacacagagtcagtcccagaccctcaaccaatcggagaacctcccgcagccccctcaggtgtgggatctcttacaatggcttcaggtggtggcgcaccagtggcagacaataacgaaggtgccgatggagtgggtagttcctcgggaaattggcattgcgattcccaatggctgggggacagagtcatcaccaccagcacccgaacctgggccctgcccacctacaacaatcacctctacaagcaaatctccaacagcacatctcacggatcttcaaatgacaacgcctacttcggctacagcaccccctgggggtattttgacttcaacagattccactgccacttctcaccacgtgactggcagcgactcatcaacaacaactggggattccggcctaagcgactcaacttcaagctcttcaacattcaggtcaaagaggttacggacaacaatggagtcaagaccatcgccaataaccttaccagcacggtccaggtcttcacggactcagactatcagctcccgtacgtgctcgggtcggctcacgagggctgcctcccgccgttcccagcggacgttttca

SEQ ID NO: 1402 - protein, 197 aa, synthetic construct
  REGION 1..197: note = Adeno Associated Virus AAP Protein Variant
LATQSQSQTLNQSENLPQPPQVWDLLQWLQVVAHQWQTITKVPMEWVVPREIGIAIPNGWGTESSPPAPEPGPCPPTTITSTSKSPTAHLTDLQMTTPTSATAPPGGILTSTDSTATSHHVTGSDSSTTTGDSGLSDSTSSSSTFRSKRLRTTMESRPSPITLPARSRSSRTQTISSRTCSGRLTRAASRRSQRTFS

SEQ ID NO: 1403 - DNA, 591 bp, synthetic construct
  misc_feature 1..591: note = Adeno Associated Virus AAP Protein Variant
  source 1..591: mol_type = other DNA
ctggcgacacagagtcagtcccagaccctcaaccaatcggagaacctcccgcagccccctcaggtgtgggatctcttacaatggcttcaggtggtggcgcaccagtggcagacaataacgaaggtgccgatggagtgggtagttcctcgggaaattggcattgcgattcccaatggctgggggacagagtcatcaccaccagcacccgaacctgggccctgcccacctacaacaatcacctctacaagcaaatctccaacagcacatctacgggatcttcaaatgacaacgcctacttcggctacagcaccccctgggggtattttgacttcaacagattccactgccacttctcaccacgtgactggcagcgactcatcaacaacaactggggattccggcctaagcgactcaacttcaagctcttcaacattcaggtcaaagaggttacggacaacaatggagtcaagaccatcgccaataaccttaccagcacggtccaggtcttcacggactcagactatcagctcccgtacgtgctcgggtcggctcacgagggctgcctcccgccgttcccagcggacgttttca

SEQ ID NO: 1404 - protein, 197 aa, synthetic construct
  REGION 1..197: note = Adeno Associated Virus AAP Protein Variant
LATQSQSQTLNQSENLPQPPQVWDLLQWLQVVAHQWQTITKVPMEWVVPREIGIAIPNGWGTESSPPAPEPGPCPPTTITSTSKSPTAHLRDLQMTTPTSATAPPGGILTSTDSTATSHHVTGSDSSTTTGDSGLSDSTSSSSTFRSKRLRTTMESRPSPITLPARSRSSRTQTISSRTCSGRLTRAASRRSQRTFS

SEQ ID NO: 1405 - DNA, 591 bp, synthetic construct
  misc_feature 1..591: note = Adeno Associated Virus AAP Protein Variant
  source 1..591: mol_type = other DNA
ctggcgacacagagtcagtcccagaccctcaaccaatcggagaacctcccgcagccccctcaggtgtgggatctcttacaatggcttcaggtggtggcgcaccagtggcagacaataacgaaggtgccgatggagtgggtagttcctcgggaaattggcattgcgattcccaatggctgggggacagagtcatcaccaccagcacccgaacctgggccctgcccacctacaacaatcacctctacaagcaaatctccaacagcacatctggaggatcttcaaatgacaacgcctacttcggctacagcaccccctgggggtattttgacttcaacagattccactgccacttctcaccacgtgactggcagcgactcatcaacaacaactggggattccggcctaagcgactcaacttcaagctcttcaacattcaggtcaaagaggttacggacaacaatggatcgaagaccatcgccaataaccttaccagcacggtccaggtcttcacggactcagactatcagctcccgtacgtgctcgggtcggctcacgagggctgcctcccgccgttcccagcggacgttttca

SEQ ID NO: 1406 - protein, 197 aa, synthetic construct
  REGION 1..197: note = Adeno Associated Virus AAP Protein Variant
LATQSQSQTLNQSENLPQPPQVWDLLQWLQVVAHQWQTITKVPMEWVVPREIGIAIPNGWGTESSPPAPEPGPCPPTTITSTSKSPTAHLEDLQMTTPTSATAPPGGILTSTDSTATSHHVTGSDSSTTTGDSGLSDSTSSSSTFRSKRLRTTMDRRPSPITLPARSRSSRTQTISSRTCSGRLTRAASRRSQRTFS

SEQ ID NO: 1407 - DNA, 591 bp, synthetic construct
  misc_feature 1..591: note = Adeno Associated Virus AAP Protein Variant
  source 1..591: mol_type = other DNA
ctggcgacacagagtcagtcccagaccctcaaccaatcggagaacctcccgcagccccctcaggtgtgggatctcttacaatggcttcaggtggtggcgcaccagtggcagacgataacgaaggtgccgatggagtgggtagttcctcgggaaattggcattgcgattcccaatggctgggggacagagtcatcaccaccagcacccgaacctgggccctgcccacctacaacaatcacctctacaagcaaatctccaacagcacatctggaggatcttcaaatgacaacgcctacttcggctacagcaccccctgggggtattttgacttcaacagattccactgccacttctcaccacgtgactggcagcgactcatcaacaacaactggggattccggcctaagcgactcaacttcaagctcttcaacattcaggtcaaagaggttacggacaacaatggagtcaagaccatcgccaataaccttaccagcacggtccaggtcttcacggactcagactatcagctcccgtacgtgctcgggtcggctcacgagggctgcctcccgccgttcccagcggacgttttca

SEQ ID NO: 1408 - protein, 197 aa, synthetic construct; identical to SEQ ID NO: 1234
  REGION 1..197: note = Adeno Associated Virus AAP Protein Variant

SEQ ID NO: 1409 - DNA, 591 bp, synthetic construct
  misc_feature 1..591: note = Adeno Associated Virus AAP Protein Variant
  source 1..591: mol_type = other DNA
ctggcgacacagagtcagtcccagaccctcaaccaatcggagaacctcccgcagccccctcaggtgtgggatctcttacaatggcttcaggtggtggcgcaccagtggcagacaataacgaaggtgccgatggagtgggtagttcctcgggaaattggcattgcgattcccaatggctgggggacagagtcatcaccaccagcacccgaacctgggccctgcccacctacaacaatcacctctacaagcaaatctccaacagcacatctggaggatcttcaaatgacaacgcctacttcggctacagcaccccctgggggtattttgacttcaacagattccactgccacttctcaccacgtgactggcagcgactcatcaacaacaactggggattccggcctaagcgactcaacttcaagctcttcaacgttcaggtcaaagaggttacggacaacaatggagtcaagaccatcgccaataaccttaccagcacggtccaggtcttcacggactcagactatcagctcccgtacgtgctcgggtcggctcacgagggctgcctcccgccgttcccagcggacgttttca

SEQ ID NO: 1410 - protein, 197 aa, synthetic construct; identical to SEQ ID NO: 1234
  REGION 1..197: note = Adeno Associated Virus AAP Protein Variant

SEQ ID NO: 1411 - DNA, 19 bp, synthetic construct
  misc_feature 1..19: note = Primer 1
  source 1..19: mol_type = other DNA
agcagaagaacggcatcaa

SEQ ID NO: 1412 - DNA, 20 bp, synthetic construct
  misc_feature 1..20: note = Primer 2
  source 1..20: mol_type = other DNA
gtgctcaggtagtggttgtc

SEQ ID NO: 1413 - DNA, 24 bp, synthetic construct
  misc_feature 1..24: note = Probe
  source 1..24: mol_type = other DNA
caagatccgccacaacatcgagga